United States Patent Application Publication US 2008/0050393 A1 - sequence listing, part 50

SEQ ID NO: 158740 - DNA, 4457 bp, Homo sapiens
gtgagtcgcgcggacggagccggacaaaagcgggcggcggcggcaggatgaacagcatcaagaacgtgccggcgcgggtgctgagccgcaggccgggccacagcctggaggccgagcgcgagcagttcgacaagacccaggccatcagcatcagcaaagccatcaacacccaggaggcccccgtgaaggagaagcacgcccggcgcatcattctgggcacacaccacgagaagggggctttcaccttctggtcctatgccattgggctgccgctgcccagcagctccattctcagctggaagttctgccacgtcctccacaaggtccttcgagacgggcaccccaatgtgctgcatgactgccagcggtaccgcagcaacatccgggagattggagacctgtggggacatttgcatgaccgctacggacagctggtgaatgtctacaccaagctgctgctgaccaagatctccttccacctcaagcatccccagtttcccgcgggcctggaggtgacagatgaggtactggagaaggcagctgggaccgatgtcaacaacatcttccagctcactgtggagatgtttgattacatggattgtgagctgaagctttctgaatcagttttccgacagctcaacacggccatcgccgtatcccagatgtcctcaggccagtgccgcctggcccccctcatccaggtcatccaggactgcagccacctctaccactacacggtcaagctcctgttcaagctacactcttgtctccctgcggacaccctgcaaggccacagggaccggttccacgagcagtttcacagcctcaggaacttcttccgcagagcctccgacatgctgtacttcaagcggctcatccagatcccccggctgcccgagggaccccctaacttcctgcgggcctcagccctggctgagcacatcaagccggtggtggtgatccccgaggaggccccggaagatgaggagccggagaatctcattgagatcagcacagggccccccgcgggggagccagtggtggtggctgacctcttcgatcagacgtttggaccccccaatgggtctgtgaaggacgacagggacctccagattgagagcttgaagagagaggtggaaatgctccgctctgaactggagaagatcaagctggaggcccagcggtacatcgcgcagctgaagagccaggtgaatgcactggagggtgagctggaggagcagcggaagcagaagcagaaggccctggtggataatgagcagctccgccacgagctggcccagctgagggctgcccagctggagggcgagcggagccagggcctgcgtgaggaggctgagaggaaggccagtgccacggaggcgcgctacaacaagctgaaggaaaagcacagtgagctcgtccatgtgcacgcggagctgctcagaaagaacgcggacacagccaagcagctgacggtgacgcagcaaagccaggaggaggtggcgcgggtgaaggagcagctggccttccaggtggagcaggtgaagcgggagtcggagttgaagctagaggagaagagcgaccagctggagaagctcaagagggagctggaggccaaggccggagagctggcccgcgcgcaggaggccctgagccacacagagcagagcaagtcggagctgagctcacggctggacacgctgagtgcggagaaggatgctctgagtggagctgtgcggcagcgggaggcagacctgctggcggcgcagagcctggtgcgcgagacagaggcggcgctgagccgggagcagcagcgcagctcccaggagcagggcgagttgcagggccggctggcagagagggagtctcaggagcaggggctgcggcagaggctgctggacgagcagttcgcagtgttgcggggcgctgctgccgaggccgcgggcatcctgcaggatgccgtgagcaagctggacgaccccctgcacctgcgctgtaccagctccccagactacctggtgagcagggcccaggaggccttggatgccgtgagcaccctggaggagggccacgcccagtacctgacctccttggcagacgcctccgccctggtggcagctctgacccgcttctcccacctggctgcggataccatcatcaatggcggtgccacctcgcacctggctcccaccgaccctgccgaccgcctcatagacacctgcagggagtgcggggcccgggctctggagctcatggggcagctgcaggaccagcaggctctgcggcacatgcaggccagcctggtgcggacacccctgcagggcatccttcagctgggccaggaactgaaacccaagagcctagatgtgcggcaggaggagctgggggccgtggtcgacaaggagatggcggccacatccgcagccattgaagatgctgtgcggaggattgaggacatgatgaaccaggcacgccacgccagctcgggggtgaagctggaggtgaacgagaggatcctcaactcctgcacagacctgatgaaggctatccggctcctggtgacgacatccactagcctgcagaaggagatcgtggagagcggcaggggggcagccacgcagcaggaattttacgccaagaactcgcgctggaccgaaggcctcatctcggcctccaaggctgtgggctggggagccacacagctggtggaggcagctgacaaggtggtgcttcacacgggcaagtatgaggagctcatcgtctgctcccacgagatcgcagccagcacggcccagctggtggcggcctccaaggtgaaggccaacaagcacagcccccacctgagccgcctgcaggaatgttctcgcacagtcaatgagagggctgccaatgtggtggcctccaccaagtcaggccaggagcagattgaggacagagacaccatggatttctccggcctgtccctcatcaagctgaagaagcaggagatggagacgcaggtgcgtgtcctggagctggagaagacgctggaggctgaacgcatgcggctgggggagttgcggaagcaacactacgtgctggctggggcatcaggcagccctggagaggaggtggccatccggcccagcactgccccccgaagtgtaaccaccaagaaaccacccctggcccagaagcccagcgtggcccccagacaggaccaccagcttgacaaaaaggatggcatctacccagctcaactcgtgaactactaggccccccaggggtccagcagggtggctggtgacaggcctgggcctctgcaactgccctgacaggaccgagaggccttgcccctccacctggtgcccaagcctcccgccccaccgtctggatcaatgtcctcaaggcccctggcccttactgagcctgcagggtcctgggccatgtgggtggtgcttctggatgtgagtctcttatttatctgcagaaggaactttggggtgcagccaggacccggtaggcctgagcctcaactcttcagaaaatagtgtttttaatattcctcttcagaaaatagtgtttttaatattccgagctagagctcttcttcctacgtttgtagtcagcacactgggaaaccgggccagcgtggggctccctgccttctggactcctgaaggtcgtggatggatggaaggcacacagcccgtgccggctgatgggacgagggtcaggcatcctgtctgtggccttctggggcaccgattctaccaggccctccagctgcgtggtctccgcagaccaggctctgtgtgggctagaggaatgtcgcccattactcctcaggcctggccctcgggcctccgtgatgggagccccccaggaggggtcagatgctggaaggggccgctttctggggagtgaggtgagacatagcggcccaggcgctgccttcactcctggagtttccatttccagctggaatctgcagccacccccatttcctgttttccattcccccgttctggccgcgccccactgcccacctgaaggggtggtttccagccctccggagagtgggcttggccctaggccctccagctcagccagaaaaagcccagaaacccaggtgctggaccagggccctcagggaggggaccctgcggctagagtgggctaggccctggctttgcccgtcagatttgaacgaatgtgtgtcccttgagcccaaggagagcggcaggaggggtgggaccaggctgggaggacagagccagcagctgccatgccctcctgctccccccaccccagccctagccctttagcctttcaccctgtgctctggaaaggctaccaaatactggccaaggtcaggaggagcaaaaatgagccagcaccagcgccttggctttgtgttagcatttcctcctgaagtgttctgttggcaataaaatgcactttgactgtttgttgtc

SEQ ID NO: 158741 - DNA, 1213 bp, Homo sapiens
agcaagtcggagctgagctcacggctggacacgctgagtgcggagaaggatgctctgagtggagctgtgcggcagcgggaggcagacctgctggcggcgcagagcctggatgatttctcgcccacgagcaagctccagcgtttgctggcggaatctcgtcagatggtgacggacctggagctgagcacactgctgcccatcagccatgagaatctcactggcagtgccacaaatataaggaaatgctgcctgcagagctgcagccacggtctcatcgccaaaccttctgcaacccttattcagcatgtcctgctgttatttatagctgaaggaaccttgcgagtggaggggtcctacagctttacagccacagcaccggacacggccctggacagcgacggcgaagcccggccaggggccgcttttgcaacttcaatgccaagctcacgtctggctgcgaccgtggcaggctgtggcatcccccgacagcggccggtggcgggaggttatgggggcgggtggcaccgctgcactcgagattcacagaacatgggcaagccccgcctgactgggcatgggcagttgaatcgtcctgttacagcttcatttcctttaagaaaacagttaacagtaggagtttcaagtccccaggagcagggaatgtatggtcactgaggacaaaagggcagtggcctggccccgtggccgaggaccccgctttcagtttcttgccttctgttcaccctgggcggctaaggcaaaggtcgggggccctggaatgcccgacaagtgacaggggaggggcgggccagaaggtccactggtaaagcacctcggccttttccgtcaacaggtgccactgccccctggctgggccctgggctttcagcacacatgggcacgtgaaagatgaggtcccacaggggttggggggaaagagcaggtgcagaacggttggagtgcagccccgttccttcaattcccatggggccgggctttcctacaaccccatagcgtgccccaccctgaggcccagccaccagccaaccagggtcagtgtattttgtataaaagtaccgtgggtcaagccccccgcacgtttaagccacgtgtgacggggcaatgaacttgggctggccgttcagagaaagcagcgccggggccttgtccagcccttagcaggtgtcagtcacggcccatcggcaaagtaagg

SEQ ID NO: 158742 - DNA, 393 bp, Homo sapiens
  misc_feature (1)...(393): n = a,t,c or g
ctnnnnnnnnnnnnnnnnnnnnnnnnnnnnaggggacgcgggtgctgtccaccttctgtcggcacaggttggcgaggcttaatgactgcccagcccatgcagtccaagagtcccacagcccagcccatgcccaggctcatacactgcggggggtggcctctgccaggggaggctaggaaaccccagggggtttcaaagacaacctccacgctgtgatctgcttggctgaaaactcggtggggcccaatgcgacaaggccagatgacatccacctgctgttctcagggaagacggtggaaatcaacaacacggatgccgagggcacgctggtgctggcagatggcgtgccctatgcttgcaaggacctgggggccgacatcattctggacatgn

SEQ ID NO: 158743 - DNA, 400 bp, Homo sapiens
  misc_feature (1)...(400): n = a,t,c or g
ctnnnnnnnnnnnnnnnnnnnnnnnnnnnnaggggacgcgggtgctggccaccttctgtccgcacaggttggcgaggcttcatgagtgcccagcccatgcagtccaagagtcccacagcccagcccatgcccaggctcatacactggggggggtggcctctgccaggggaggctaggaaaccccagggggtttcaaagacaacctccacgctgtgatctgcttggctgagaactcggtggggcccaatgcgacaaggccagatgacatccacctgctgcactcagggaagacggtggaaatcaacaacacggatgccgagggcacgctggtgctggcagatggcgtgtcctatgcttgcaaggacctgggggccgacatcattctggacatggccaccct

SEQ ID NO: 158744 - DNA, 898 bp, Homo sapiens
ttcagaagaacactcattacatgatgatctttgatgcctttgtcattctgacttgcttggtttcattaatcctctgcattagatctgtgattagaggacttcagcttcagcaggagtttgtcaattttttcctcctccattataagaaggaagtttctgtttctgatcaaatggaatttgtcaatggatggtacattatgattattattagtgacatattgacaatcattggatcaattctaaaaatggaaatccaagctaagagtctaactagttatgatgtctgtagcatacttcttgggacttctaccatgctcgtgtggcttggagtcatccgatacctcggtttctttgcaaagtacaacctcctcattttgacccttcaggcagcgctgcccaatgtcatcaggttctgctgctgtgcagctatgatttacttaggttactgcttctgtggatggatcgtgctggggccttaccatgacaagtttcgttctctgaacatggtctctgagtgccttttctctctgataaatggagatgatatgtttgccacgtttgcaaaaatgcagcaaaaaagttacttagtctggctgtttagtagaatttacctctactcattcatcagcctctttatatatatgattttaagtcttttcattgcactgatcactgatacatacgaaacaattaagcaataccaacaagatggcttcccagagactgaacttcgtacatttatatcagaatgcaaagatctacccaactctggaaaatacagattagaagatgaccctccagtatctttattctgctgttgtaaaaagtagctatcaggtttatctgtactttagaggaaaatataatgtgtagctgagttggaacactgtggatattt

SEQ ID NO: 158745 - DNA, 473 bp, Homo sapiens
ttgatcccctcggaccgcccgttgatcgcgtcgacccacgcgtgcgctgacagcaacgatctgaaagtcattatcatctcggctgttgggcctgtgttttcttctgtgcatgacttaaaggagctgacagaggagcaaggccgtgattaccatgccgaagtatttcagacctgttccaaggtggccttggagatgctctttactggtgagcccatttctgcccaggaggccctgctccacgggctgcttagcaaggtggtgccagaggcggagctgcaggaggagaccatgcggattgctaggaagatcgcgtcactgagccgtccggtggtgtccctgggcaaagccaccttctacaagcagctgccccaggacctggggacggcttactacctcacctcccaggccatggtggacaacctggccctgcgggacgggcaggagggcatcacaggcttcctccagaagagaag

SEQ ID NO: 158746 - DNA, 1010 bp, Homo sapiens
tcaccagccttgcactgaggtcagcacctcagtcactctccattttgtcctttcccaatgaaattgtggcttttaatgtaggccaaatgctatgacaccaatatcaagtcacgaaagcagcctgtcacctgttgaagctgagaggcagtggtggctgggccagaggggaaggtgggctcctgggcgctgcccgtgggcctcactcctctgcctccactcacactggctcgtgtgaccagacaggttttctcttgtggaggaaggccgtgatgccctcctgcctgtcccgcagggccaggttgtccaccatggcctgggaggtgaggtagtaatccgtccccaggtcctggggcagctgtttgtagaaggtggctttgcccagggacacccccggacggctcagtgacgcgatcttcctagcgatccgcatggtctcctcctgcagctccgcctctggcccccccttgttaagcagcccgtggagcagggcctcctgggcagaaatgggctcaccagtaaggagcatctccaaggccacctttctaggcactgctcttgccaagacaaccccaggggtagaacagaagagcctgacgttcaccccaggagtggcaaaagaggtcttgtcgctcgcctcggcatatgtcgcagctggcaaccagttgacagccggcagccgtggccaggccattgaccatggcaatgacggggacggggtggttccggatgtgcatcatgaccttggaacaggtctgaaatacttcggcatggtaatcacggccttgctcctctgtcagctcctttaagtcatgcccagaagaaaacacaggcccctcagccgagatgataatgactttcagatcgttgctgtcagcgtcatgaagaatgtcactttggagagatttcagcattgcaagtgacaacgtgttcctcttcttgggattgctcaagacgatgttccttatgccgtccagcgaattccaccacatggcctagtgttctacgagggg

SEQ ID NO: 158747 - DNA, 350 bp, Homo sapiens
ccctgctgctcgcatcccaacgcggtgctcggcgtacagcagacgctggaggagatggacttccagaggggaatctggtcggcagccctgaatggagacctgggccgagtgaagcatttaatccagaaggccgaggacccaagtcagcccgactcggccggctacactgcgctgcactatgccagccgcaatgggcactacgctgtgtgccagttcctgctggaaagcggagctaagtgtgatgcccagacccacgggggtgccactgctctgcaccgagccagctactgcgggcacactgaaatcgggcggctcctgctatcacatgggtccaaccccaaggtggggga

SEQ ID NO: 158748 - DNA, 399 bp, Homo sapiens
attttttattcctctttaggctttttgtactatctttctattagtatttgatggtactactgatgtagcaagtgcagtttgactttcttcccttgttgcctaaagtagattttctaaagtatttgatttttcacccatcattcacgtacataacttcacgccaccatatttttgttaaaatcttttgaccgagatttgctgttgtgtattacaaactgtttgggaagaacaataactgtttcacgtttcttctttggacttccttttctagtattacaaatgcggcgcccagtttgctttggtaacccttggaacacttggtacatacacagcattcacagttgcagtcacacggtggaggtaatttattccctagaagccacataaaatttagaaatt

SEQ ID NO: 158749 - DNA, 412 bp, Homo sapiens
atctttggggagcttttgctatttctgcaccatcagtacccaggtgatatcggctgctttgccatctacttcctgaacctgcttaccctgaagcctggggaggccatgtttctggaggccaacgtaccccatgcctacctgaaaggaggtgagccacatttcagcagtgagccccactgccatccctgctgggccctgtttccctatctggacaaaggaaggagaagggtggtcaaggagacccccaaggaccttgcagctctgacctctgagggttcctgggctcagcaagcaacagctggtagggatgatgaatgcatttagcattgaacacgccttgaatcctgacaccaaccctgtgatgccatgctactctgattttaaggcctgcccgtcacgggtggaacccact

SEQ ID NO: 158750 - DNA, 344 bp, Homo sapiens
  misc_feature (1)...(344): n = a,t,c or g
tcggccccctcactgcaagcagctgcacccagttaacccccagctcctgacactgaccccacacccacctacccaggactcaccctgctcctcactaacccccgaactaactcaaccctgcctcccacactgcacctgccctcacgaccgaccccatcctcacccccatcaacatctctgcctccctccttggtcctagggttttttttaaaaattcaatcaggaaaacggagggcatacccagaacacttctgggtgcagaatggggagagaaaggctcagccatccgtccatgcccctgtgaattcagccagcgcttatgtcgacgcggccgcgaattccan

SEQ ID NO: 158751 - DNA, 412 bp, Homo sapiens
acagtgcaaggcttcacacggtttatagagttccccgactgaaccacccgcctgaggagataggctgtcactcgagagtacctggtagcgcacacccctcggaaaaaccaccatccgctccagcctcggcacctcagaatgtatttagtacgactgtaagcagtggttataacaccaaaaaaataggcccgaggcttaatatccagcttaagaaaggtacagaaggtttgggattcagcatcacttccagagatgtaacaatagggggctcagctccaatctatgtgaaaaacattctcccccggggggcggccattcaggatggccgacttaaggcaggagacagacttatagagggaaatggagtagatttagtgggcaaatcccaagaggaagttgtttcgctgttgaa

SEQ ID NO: 158752 - DNA, 438 bp, Homo sapiens
agagtcgctatggcggcggtggattcggatgtctaatcgctgccgcgtggggggttccgctgctgcctctgccacgttactacagccaaccgacccagccttgatgcccacttgggaggcagaaagcaccggcacctggtagaactacgagctgcgagaaaggcccagggacttcgaagtgtgtttgtcagtggctttcccagggatggggattctgctcagctctctgagtacttcctagcatttggacctgtggccagtgttgtcatggacaaggacaagggagtgtttgccattgtggagatgggggacgtgggtgctcgagaggctgtcttgtcacagtcccagcacagcctgggaggacattcgctgcgtgtcccgccaccggagcaaaaggagtccagagccccgcctccaaatccccaaaggagcggcccc

SEQ ID NO: 158753 - DNA, 424 bp, Homo sapiens
cggacgcgtgggaaaacttcgcaagatgatgattattgctgagaacaaaaaggacatgagtgggcactatcagaatgccctatacttgggtgatgggtcaaatcgtgggcggatcctgaaaaactgtggacagaagtccctggcctatttcacaagtgctacccatggcttatatgaagacactgaaagcctaaaggagacatttgacccaaagaaggagacaatcccacacatttaccctaatgccaggctgctccagcctcctgcacctatattgccattggataccaactggactttattgactgtatccaacggattttttgaaggcaccattgcccgcaaagggaagggaggagtactggctgcttgcatagacattgtcactggatggtccataggctggcgaaggggagtcaaactg

SEQ ID NO: 158754 - DNA, 885 bp, Homo sapiens
agtgacctggaaacaagttctgatccagaaggtgaggattgggatgaggaagctgaggatgatggttttgatagtgatagctcactgtcagactcagaccttgaacaagaccctgaagggcttcacctttggaactctttctgcagtgtagatccttataatccccagaactttacagcaacaattcagactgctgccagaattgttcctgaagagccttctgattcagagaaggatttgtctggcaagtctgatctagagaattcctcccagtctggaagccttcctgagacccctgagcatagttctggggaggaagatgactgggaatctagtgcagatgaagcagagagtcttcaaactgtgggaacttcattctgttaattctggatggacccctacaaccctttaaattttaaggctccttttcaaacatcaggggaaaatgagaaaggctgtcgtgactcaaagaccccatcgtgagtccatttgtggccatttctgagtgtcacaccttactttcttgtaaggtgcagctgtagaaaagccaagaaagtgaatgtccagactcggtacagcgtgacgttctttctggaggaagacacacacatgtcaaaagaaaaaaggtaaccttccttgaagaagttactgagtattatataagtggtgatgaggatcgcaaaggaccatgggaagaatttgcaagggatggatgcagtgtccaaaaacgaattcaagaaacagaagatgctattggatattgcttgacatttgaacaccgagaaagaataggtaatagactccagggaacatgctgcaaaggacttaatgttctcaagcaatgttgagttggcagcctgtagtcctagctagcatacactacct

SEQ ID NO: 158755 - DNA, 697 bp, Homo sapiens
  misc_feature (1)...(697): n = a,t,c or g
acccccggattgttcaagagccgcctgtccagtgttatgtagtggcaacgggcagtactccaagggccgctgcctgtgtttcagcggctggaagggcaccgagtgtgatgtgccgactacccagtgtattgacccacagtgtgggggtcgtgggatttgtatcatgggctcttgtgcttgcaactcaggatacaaaggagaaagttgtgaagaagcaccaagatacattccaaagaaggaaagnnnnnnnnnnnnggcagccactttgtttgtgtaggaaaaatatttagaaaaccaaaacccaaatggtggctacgggttatcttttggcccaggggggttactagaaacttttcttttttatttaacccctgagttttgcagggtttacttttgaaaccactttacatgacttttgtccttaggaaataattaaaattgtaaggatcttttgaaatattttaggccaaaccttttgataaaaacttggtttttttttattctgaaaatttttaaaaccaaacccaaaaaaggggtaggttaaagggaatattaagggtatttttccttcggggccttgacatacatgatgataggggattaaaactttaccctaggaggaggtttaacggtttttttggcaattgcccaaaatttccaaaggnnnnnnnnnnnnnnnnnnnnnnngggcccccgt

SEQ ID NO: 158756 - DNA, 533 bp, Homo sapiens
  misc_feature (1)...(533): n = a,t,c or g
cgccgttccggattgttcaagagccgcctgtccagtgttatgtagtggcaacgggcagtactccaagggccgctgcctgtgtttcagcggctggaagggcaccgagtgtgatgtgccgactacccagtgtattgacccacagtgtgggggtcgtgggatttgtatcatgggctcttgtgcttgcaactcaggatacaaaggagaaagttgtgaagaagcaccaagatacattccaaagaaggaaagnnnnnnnnnnnnggcagccaccttgtctgggtggaaaaaatagttagaaaaccaaaacccaaatggtggctacgggttatctttgggcccaggggggttactaggacctttccttttttactaaacccctgatttttccagggttaacttttgaaacccttttacatgaactttggacctcttaggaaatttaaatttaaaattgttaaggaatccattaggaaataaattataaattcaaacaccctttgtgataaagacactgggcctttttttttaaaattcgg

SEQ ID NO: 158757 - DNA, 403 bp, Homo sapiens
caatggaagagttttgtggggcaattgtaggaagcagaatggagaccctgccttgaagatgtcatgtaaaaacataaagaatcacacatgtatacgtgcggcatacagacattcctcagccgaaaggaccccaaactggcttaatgaaatgtcaaattatatctttttaagtttaaactaaatgatagcgttttaccttggtcccttataaggaattacattaagtcaaatgttaatgaaaggtatatttctgtggggagggagacctgggaaataaggccaaggagatatgaattatacacctgtacttttgtgttttctttgaggaccattcagacaatccccttggtgcagccgtgacccttgcacatgagcttgggcacattttcggatggatatgaaa

SEQ ID NO: 158758 - DNA, 413 bp, Homo sapiens
  misc_feature (1)...(413): n = a,t,c or g
gcattgttcaaccctgtagcaagaagtagctgatcttgtccaaatctgaagcgatgccattctatatttacacagcgactctgtttttctggaactgatgacccaaaagcaagactccagactatatctccacagtctataatatgttcacgaggcttatttttctgaccaccatcactattttgtcttggcaatcttaaactgcttgaattggtaacattcttggtgccatgcaagagacgatctctttctcgttgaccctcgggggaaagctggccatctatggggcaccgtctgattccgggaatacgatgcggacccaacaacagagaagagagtggcgaccgctgaggggcgtgacgccaagttggtccctcccgggcccagggacagaggagacgggcgggnnctnn

SEQ ID NO: 158759 - DNA, 409 bp, Homo sapiens
gcggccgcccccgcccgtctcctctgtccctgggcccgggagggaccaacttggcgtcacgcccctcagcggtcgccactctcttctctgttgttgggtccgcatcgtattcccggaatcagacggtgccccatagatggccagctttcccccgagggtcaacgagaaagagatcggaaaactcctccttaacttggtagatcatactgaagtggtcagagatttaacttttgctccagatggaagcttgatcctggtgtcagcttcaagagacaaaactctcagagtatgggacctgaaagatgatggaaacatgatgaaagtattgagggggcatcagaaattggtgtacagctgtgcattctctcctgactcttctatgctgtgttcagtcggagccagtaaagca

SEQ ID NO: 158760 - DNA, 2109 bp, Homo sapiens
ttttttttttagtagagacagggtttcatcatgtttgccaggctagtctcaaactgctgacctcaggtgatttgcccgcctcacccaattcaactttcgtaagtcagtatttaccatctaactcagtgtcccagaatttaaaatttccttgcactttacagcaaagatacatattgtggctctactgaagcaatatatacatgtcagaactaaaaatcagaaaagcaaaagggtccattcaacatatagcagcctatattctaaatatgtacaggtatgtatgttttcacagttagatctttaaaaaaatttatatttgatatgttcagaaatacttctattgtctataaataatattttaaaagctcaactgatccaaatgcagtacaagaacatatccaaattaaataaaccttctacgtctttaaaaacagataattgaagtcaagtaaagcttgaggtttgtgttaagtgtattctgtcagtccctactactagggaaggcagaatcttctaaatacgatacgagagaaactccaaaagcttggaaggaatcggcagctcctgaacttcttgggtgggcatcactcttcgggattgacatgcgacattaaatgttgcagggctagggacctgccgtggagtggcccaaaaatacacacttccgtcatgtgtcccagcagctaaaacactgccatcagtagagaaggcacagcaaagaccattgctcaaagggtgcaacttgcactggataatcctcatcaattctccagaacctcaccattttatcatcagcaaggcttgcaacatgcagtccatcatggctaaaagatacagatcgtacccaccggtcatttgctcctccagcaaatattggagtaggtgggggaaacaggtgaacaaattaacatcagaatgtctccattatgtggatcccagatatatactcgagtatcataagatgcagtagccagtaatgctccatcaggagaaaagtcacaagctacccacattcatggtgatgtccttctagtttccgtatcatggtgtatttatccatattccaaaggaaaactgctttactggctgcgactgaacacagcatataagagtcaggagagaatgcacagctgcacacccaattttgatgccccctcaatactttaatcatgtttccatcatctttcaggtcccatactctgagagttttgtcttttgaagctgacaccaggatcaagcttccatctggagcaaaagttaaatctctgaccacttcagtatgatctaccaagttaaggaggagctttcctgtatatacatcccatattttgatacgcccattgctcatccctggagcaagaagaagctgatcttgaccaaatctgaagcgatgccattctatatttacacagcgactctgtttttctgggaactgatgacccaaaagcaagactcccagactatatctcccacagtctaataatatgttcacgaagccttaatttttctgaccaccatcactattttgtcttggcaatcttaaactgcttgaattggtaacattcttggtgccatgcaagagaaagttctgaaggcactgggacccacggaacaagctttactgtgcgatgtccttgtgaccaagcaaagtatgaaccatctggagcaaaagcaacagtccaattttcacgaccacatttcttgtcaaaaggagctgcaggagctaaaagttcacctatagtacgtgatctcacgatctctttctcgttgaccctcgggggaaagctggccatctatggggcaccgtctgattccgggaatacgatgcggacccaacaacagagaagagagtggcgaccgctgaggggcgtgacgccaagttggtccctcccgggcccagggacagaggagacgggcgggggcggccgctgcggcttctgctaactgcctcgggaaagctcccgaaggcctcagaccaaagtacggagtcaaccacagacaatagaccctgtacccagcctcgcgcctgcggaggaagacagttcccctaaagcgccgactgcaaacgagacactggagtcaaaatggcgggcggcgccggagatatct

SEQ ID NO: 158761 - DNA, 4259 bp, Homo sapiens
tttttctttttttttttttttttttttttttttttttttttttttttttttttttacaagtctttaattaaaaaactcaacaaaaatatataattgagcattttacataatgcatacattcttaatatctgcaggtaagataaacaacagaaggcaaaagcagatatgctgtattgcttctttggcaactcaccaatatcatcccctgcagaaacagagtttttttttttttctttaaatccatggtcttaaaataattgtcccttagtataaacaaaatatttagcaataatacagtagacggattcttcaaattcacaacaatttataatactttataccacaagggtaaactagtaagctgctttctaaaattaaggcagcagcagtgtttagagggggagtaaaaaaaaaaaaaaagacatcctttttctagttatatcctggctctgccttctttgttgttgtttttaaataacgtcacattcaagctctacgtcttggatgacattcctaaggataataaaatccttttccctgtacataaactgtgtttcacttccagatcagtctgacactctccaacaaaaccaaatacatttcgtatgaggcaacacaatttttttttttttttgagatggagtctcgctctgttgtccaggtttggagtgcagtggtgtgatcttggcttactgcaacctccacctcctgggttcaagcaattctcctgcctcagcctcccaagtagctaggactacaggtgtgcaccaccacgcctggctaattttttttttttttttgtatttttagtagagacagggtttcatcatgttggcgcaggctagtctcaaactgctgacctcaggtgatttgcccgcctcacccaattcaactttcgtaagtcagtatttaccatctaactcagtgtcccagaatttaaaatttccttgcactttacagcaaagatacatattgtggctctactgaagcaatatatacatgtcagaactaaaaatcagaaaagcaaaagggtccattcaacatatagcagcttatatctaaaatatgtacaggatatgtagtgttttccacacgttagatcttataaaaacaatttactatttgatagtgttacgagaaaatacttctattgtctataaataatattttaaaagctcaactgatcaaaatgcaggtacaagaacatatccaaattaaataaatcttctacgtctttaaaaacagataattgaagtcagtaaagcttgaggtttgtgttaagtgtattctgtcagtccctactactagggaaggcagaatcttctaaatacgatacgagagaaactccaaaagcttggaaggaatcggcagctcctgaacttcttgggtgggcatcactcttcggattgacatgcgacataaatgttgcaggctagggacctgccgtggagtggcccaaaaatacacacttccgtcatgtgtcccagcagctaaaacactgccatcagtagagaaggcacagcaaagaccattgctccaaaggtgcaacttgcactggataatcctcatcaattctccagaacctcacccattttatcatcagcaaggcttgcaacatgcagtcccatcatggctaaaagatacatatcgtacccaccggtcatttgctcctccagcaaatattggagtaggtgggggaaacaggtgcccaaattccatcagaatgtctccattatgtggatcccagatatatactcgagtatcataagatgcagtagccagtaatgctccatcaggagaaaagtcacaagctaccacatcatggtgatgtccttctagtttccgtatcatggtgtatttatccatattccaaaggaaaacctgcaataaaaaggcaaatgttatagcttcattcagacatacagaggacaaaatggcacctcttatactaaagctgctaaatttaattaagattatattaagcattataaattatgagtaatttaaagaatatgctcagtgtcatagtcagattaaaatcagtctttaagttaattaaggcagacatgcaaattctatttcaaatgtttctgttaaatgttaatttaaaaataagcctaaacataaaataaaggcaatgctttttaacctcaaagctatactgaaatccatttattccaaaaactaattaactaaaatatacggaaataaatagggttaagtactacaaacccccttctctttttttttccagaaactaccagatttttaaaaaaatatacagacagaaaacgtaaggttaacaaattgttactccattggcatctccctttgagataatcacttgtttacaataggcttgggtcaccaacttgagcctaggaagagaaacagatactgcaagcaaatagaatattcacagccaaatgaaatttctttggcaaacaacaaggatgttaaaccacattacaaaatgaaaatgctattttatgaaaataatacaattacatttcaataaatcaaaatttaaccatcttatttttccccaaactaaccacgatcataagtcatttgaatataaaacggttcaattatttaagaataagttcatatacaattttagattctaaagatcagtagttaactgtgcagaatagctctaaacaggattctaatgtttacttcagtctgttatattaaatgtgagcttggaggtttatcctaagacaatctctcctcttggagtaaagcaatcctttttggttttttttttttctgcacagacacaatacattatttctaaaagaaaataagtacaaattttaaattgaatcaaagacgtaagatatctctggaatctgaaagaattccaaaaaatagcacagagaaaccatttgaaagccaaatactttacattaaattggtttcacttgtcagactcccaattccataaaactggaaaatcaatttactcaggagtcagtgtattttactgtgggggaaattactttaaaaaagaaaaaaagaaagaaagaaaagcagaaagtggacatcgaccagcacctgtgtacgtacagtacaccttgcagccgaatgcaaggttacttcatcctatggtaaaggtcgcccccagcccggtagccagagatgccactctttctgcccagctaacaccattgtgcgcctgtgtgcgagtggtgccagcataacctcaatcacaccaatattgctgccaccactgctttactggctccgactgaacacagcatagaagagtcaggagagaatgcacagctgtacacccaattctgatgccccctcaatactttcatcatgtttccatcatctttcaggtcccatactctgagagttttgtctcttgaagctgacaccaggatcaagcttccatctggagcaaaagttaaatctctgaccacttcagtatgatctaccaagttaaggaggagttttcctgtatatacatcccatattttgatacgcccattgttcaaccctgtagcaagaagtagctgatcttgtccaaatctgaagcgatgccattctatatttacacagcgactctgtttttctggaactgatgacccaaaagcaagactccagactatatctccacagtctataatatgttcacgaggctttatttttctgaccaccatcactattttgtcttggcaatcttaaactgcttgaattggtaacattcttggtgccatgcaagagaaagttctgaaggcactgggaccacggaacaagctttactgtgcgatgtccttgtgaccaagcaaagtatgaaccatctggagcaaaagcaccagtccaattttcacggacaacatttcttgtcaaaaggagctgcaggagctaaaagttcacctatagtacgtaatctcactaaaaggaaaaataaaaatacgatctctttctcgttgaccctcgggggaaagctggccatctatggggcaccgtctgattccgggaatacgatgcggacccaacaacagagaagagagtggcgaccgctgaggggcgtgacgccaagttggtccctcccgggcccagggacagaggagacgggcggggccgaccgctgcggcttatgctaactgcctcgggaaagctcccgaaggcctcagaccaaagtacggagtcaaccacagacgatagaccccgtaccccgcctcgcgcctgcggaggaagacagttcccctaaagcgccgactgcaaacgagacactgccc

SEQ ID NO: 158762 - DNA, 403 bp, Homo sapiens
tggcaacctctggcctccctggggctcaaagtggaccctccctgccctcgggtctccctgaagtagctaggactactggcactagccaccacaccccagctaatttttgtattttttgtaaagatgggcccagactggtctcgaattcctgagctcaagcaatccacccacctcggccttccgaagtgctggaaccacaggcacaagccactatgcaatacatttcaatcttatttttacccgtggacatacaattgccatccctcatgtaaaaagattaaagtcaagtggagacaagtgtaaatattcaactctgttacataatgtacaatgtgagctttaaacattaatatgtaaaattaattattagggaaataaaacgctctcataaacaatgcaatca

SEQ ID NO: 158763 - DNA, 370 bp, Homo sapiens
  misc_feature (1)...(370): n = a,t,c or g
gttcagattgcacatggacaataaatctacccataggttttggtgtacatctccagtttgtaaatttttctacagaaaccatacatgattatttggaagtacgaagtggatcctcagaaactagtactgttattggccggcttagtggtcctcaaataccatcttccttattcagcaccacccatgaaaccagcttatattttcacagtgactattcacaaaacaaacaagggtttcatattgtataccaaggtaagagaaataataaaaaatgaaaatttatataaccccaaatcagctattagaaatatttaactgagtctaattattttctgtattctgttttagaaagnnnnnnnnnnnnnnnngg

SEQ ID NO: 158764 - DNA, 567 bp, Homo sapiens
atgtccctgggttgtttttcagaaacctggaccccaccaaatggatctgttggcatgtacacatcagcaatccaaatgtcagtgtttagctttgctgcactgggtgggcagaccgaagttcagtttggtaacatgcccagaagaggaactgttagttcaaatgagagaagccactatagcaggtatgggggtggtatcacagtactgagagaggagaaaggaagaaaccgacacatagacacttgccattgtgttcgcattgcctacagcgttcagtacagtaacatgctgtgcagggaacgtgttgagaataccagtcacccaggagagatgcaagtaaccattcaaaacctaatgccagcgaccgtgtacatctttagagttatggctcaaaataagcatggctcaggagagagttcagctccactgcgagtagaaacacaacctgaggctatttcagatgttttccactacctgcaaattctggtccttcccaacaccaccacccttctctcatcatcagcagatgaactcatctcatattttagaggctattcaagccgttaa

SEQ ID NO: 158765 - DNA, 364 bp, Homo sapiens
aaatcgcaacttatgtgccaacaaatgtatatgggcgaaaaaccctttggatgccgctgttgtgagaaagccttcagcaacaagtcataccttctagtgcatcagcaaactcatgccgaagagaaaccctatggttgtaatgaatgtgggaaagacttcagtagtaaatcatacctcattgtacatcagagaattcatactggagagaaactacatgaatgcagtgaatgcaggaaaacattcagtttccattcacagcttggtatacatcagagaattcacacaggtgagaatccctatgagtgctgtgaatgtgggaaagtcttcagtaagaaagaccagcttgtttcacaccagaaaactt

SEQ ID NO: 158766 - DNA, 368 bp, Homo sapiens
caggcaccctgtgttgtgatagttcacaaactcagacggagtggatgaccagtatctttattgcccaggtacgagatttgtttgaactatccagtagagtataataactttgttcacaggaaatgttagtgtgatggtgatttctaaagaatttttaataagcattttaaatgtatgtacaattggcataaactttgattctctcattcttagtttttaaaatagtatattaaagttcaaatttattcattaccttttgaaagagagtttattccattaaagcgtcttttctgccagccccacagcctccttggcttaggtgaggtgtgttgctttaaaatggtcgtgtaagaaagagggacttttct

SEQ ID NO: 158767 - DNA, 747 bp, Homo sapiens
gtaaacggagttccctctcgaagtccaagattagttgcttctggggatgactctgtggatagtctgctgcagcggatggtacaaaatgaggaccaagagcccatggagaaaagtattgatgctgtgattgcaactgcctctgcaccaccttcttccagtccaggccgtagccacagcaaggaccgaaccctgggaaaaccagacagccttttagtgcctgcagtcgcaagtgactcttgcaataatagcatctcactcctatctgaaaagttgacaagcagctgttccccccatcatatcaagagaagtgtagtggaagctatgcaacgccaagctcggaaaatgtgcaattacgacaaaatcttggccacaaagaaaaacctagaccatgtcaataaaatcttaaaagccaaaaaacttcaaaggcaggccaggacagggaataactttgtgaaacgtaggccaggtcgacctcggaaatgtccccttcaggctgtcgtatcaatgcaagcattccaggctgctcagtttgtcaacccagaattgaacagagacgaggaaggagcagcactgcacctcagtcctgacacagttacagatgtaattgaggctgttgttcagagtgtaaatctgaacccagaacataaaaaggggttgaagagaaaaggttggctattggaagaacagaccagaaaaaagcagaagccattaccagaggaagaagagcaagagaataataaaaggtaa

SEQ ID NO: 158768 - DNA, 417 bp, Homo sapiens
  misc_feature (1)...(417): n = a,t,c or g
tggtgggttggcaacaaggggttccagaaccgccccccggcaaagctgtaaccgttcccttaaggccagctgaccccttcaaaggcaaaaaagccccagcccgcagcggatttcctgccctttttcccggtgacccccctggtgaggaatccttggggaggaggaggccagggtcctccccattaacgcccctcagcattccggaagttataaaaatatttgtgccccctgccccccaaaaatccggccattttttttccttccnnnnnnnnnnnnnnnnnnnnnnnnnnnnnnnnnnnnnnnnnnnnnnnnnnnnnnnnnnnnnnnnnnnnnnnnnnnnnnnnnnnnnnnnnnnnnnnnnnnnnnnnnnnnnnnnnnnnnnnnnnnnnnnnnnnnnnnnnnnnnnnnnnnnnnnnn

SEQ ID NO: 158769 - DNA, 637 bp, Homo sapiens
agccttcagcaggtgtagttcagccatgactgatgctgttaactaccaaagttctacctttagttcctgttagaccctaaactgtgaaacaaaaaagggttgggctaactttaaaaggccagcttcatgtttaactgggtggatttctgcacagtcctcttcagcacttaaaaagttgctagctttaaaaacgaaattttcggccaggcgcagtggcttcctctcccccatcaccccttaatcctgaaacagctgtgaggtagataccattatctgcactttatataaatacttagtcttctacggctaagagcagggttcaaacccaggtattccaacctgtgctatttggagtatattaatccacctgtctttactaaaggtgaaaacttttgcatgtggttcaatagtcagggagaagttagaaaaaaagtaatggaagaataatcatgaatttgtatgcttctatacattaactagctctttctccctttttccagagttctcttggaacggttgattgtaaataggccacatccttggggtcttcttattaccttcattgagctgattaaaaacccagcgtttaagttctggaaccatgaatttgtacactgtgcccccggacgcgtgggtc

SEQ ID NO: 158770 - DNA, 3655 bp, Homo sapiens
ttaaacttgaagtttgaaatcgaggttctctgcaagaaccttgcattagacatcaatgagctaaaacctggaaacctcctaaaggataaagatcgcctgaagaatttagatgagcaactctctgctccaaagaaagatgtcaagcagccagaagaactccctcccatcacaaccacaacaacttctactacaccagctaccaacaccacttgtacagccacggttccaccacagccacagtacagctaccacgacatcaatgtctattcccttgcgggcttggcaccacacattactctgaatccaacaattcccttgtttcaggcccatccacagttgaagcagtgtgtgcgtcaggcaattgaacgggctgtccaggagctggtccatcctgtggtggatcgatcaattaagattgccatgactacttgtgagcaaatagtcaggaaggattttgccctggattcggaggaatctcgaatgcgaatagcagctcatcacatgatgcgtaacttgacagctggaatggctatgattacatgcagggaacctttgctcatgagcatatctaccaacttaaaaaacagttttgcctcagcccttcgtactgcttccccacaacaaagagaaatgatggatcaggcagctgctcaattagctcaggacaattgtgagttggcttgctgttttattcagaagactgcagtagaaaaagcaggccctgagatggacaagagattagcaactgaatttgagctgagaaaacatgctaggcaagaaggacgcagatactgtgatcctgttgttttaacatatcaagctgaacggatgccagagcaaatcaggctgaaagttggtggtgtggacccaaagcagttggctgtttacgaagagtttgcacgcaatgttcctggcttcttacctacaaatgacttaagtcagcccacgggatttttagcccagcccatgaagcaagcttgggcaacagatgatgtagctcagatttatgataagtgtattacagaactggagcaacatctacatgccatcccaccaactttggccatgaaccctcaagctcaggctcttcgaagtctcttggaggttgtagttttatctcgaaactctcgggatgccatagctgctcttggattgctccaaaaggctgtagagggcttactagatgccacaagtggtgctgatgctgaccttctgctgcgctacagggaatgccacctcttggtcctaaaagctctgcaggatggccgggcatatgggtctccatggtgcaacaaacagatcacaaggtgcctaattgaatgtcgagatgaatataaatataatgtggaggctgtggagctgctaattcgcaatcatttggttaatatgcagcagtatgatcttcacctagcgcagtcaatggagaatggcttaaactacatggctgtggcatttgctatgcagttagtaaaaatcctgctggtggatgaaaggagtgttgctcatgttactgaggcagatctgttccacaccattgaaaccctcatgaggattaatgctcattccagaggcaatgctccagaaggattgccccagctgatggaagtagtgcgatccaactatgaagcaatgattgatcgtgctcatggaggcccaaactttatgatgcattctgggatctctcaagcctcagagtatgatgaccctccaggcctgagggagaaggcagagtatcttctgagggaatgggtgaatctctaccattcagcagcagctggccgcgacagtaccaaagctttctctgcatttgttggacagatgcaccagcaaggaatactgaagaccgatgatctcataacaaggttctttcgtctgtgtactgaaatgtgtgttgaaatcagttaccgtgctcaggctgagcagcagcacaatcctgctgccaatcccaccatgatccgagccaagtgctatcacaacctggatgcctttgttcgactcattgcactgctcgtgaaacactcaggggaggccaccaacactgtcacaaagattaatctgctgaacaaggtccttggtatagtagtgggagttctccttcaggatcatgatgttcgtcagagtgaatttcagcaacttccctaccatcgaatttttatcatgcttctcttggaactcaatgcacctgagcatgtgttggaaaccattaatttccagacacttacagctttctgcaatacattccacatcttgaggcctaccaaagctcctggctttgtatatgcctggcttgaactgatttcccatcggatatttattgcaagaatgctggcacatacgccacagcagaaggggtggcctatgtatgcacagctactgattgatttattcaaatatttagcgcctttccttagaaatgtggaactcaccaaacctatgcaaatcctctacaagggcactttaagagtgctgctggttcttttgcatgatttcccagagttcctttgtgattaccattatgggttctgtgatgtgatcccacctaattgtatccagttaagaaatttgatcctgagtgcctttccaagaaacatgaggctccccgacccattcactcctaatctaaaggtggacatgttgagtgaaattaacattgctccccggattctcaccaatttcactggagtaatgccacctcagttcaaaaaggatttggattcctatcttaaaactcgatcaccagtcactttcctgtctgatctgcgcagcaacctacaggtatccaatgaacctgggaatcgctacaacctccagctcatcaatgcactggtgctctatgtcgggactcaggccattgcgcacatccacaacaagggcagcacaccttcaatgagcaccatcactcactcagcacacatggatatcttccagaatttggctgtggacttggacactgagggtcgctatctctttttgaatgcaattgcaaatcagctccggtacccaaattgcccacactcactacttccagttgcacccatgctgtaccctttttgcaggggcccattccggaagccatcccaagaacagatcacaagagttctcttggaacggttgattgtaaataggcccacatccttggggtcttcttattaccttcattgagctgattaaaaaccccagcgtttaaggttctgggaaccatggaatttgttacacttgtgccccaggaaattcggaaaagttatttccagtcgggtcggcacagtggctggcatggggacaggaagggcagggccccagcaagttaattgggagggggacagggttgcccagttagggacggaaacttgcatctctgttgtacgtgttcagtcttggaggtctcacttgcaccgagttcataaaactgactggagaatcctttcagctccttcctgaactttccccaggccctttggttttgtgggtaatctggcccaactaactggtggggatcagccctcctggcctaatgtgggcacggttcccaaggtttaaatgccatttttttgactcttggccaaaatttagaagatgctgtgaatatcattttgaaacttgtgtaaatacatgaaagagaaaaaaaaaaaaaaaaaaaaaaaaaaaaagtcgatgc

SEQ ID NO: 158771 - DNA, 520 bp, Homo sapiens
aaaatggattccactgagccaccctacagccagaagagatatgaggaaattgttaaggaagtcagcacttacattaagaaaattggctacaaccccgacacagtagcatttgtgccaatttctggttggaatggtgacaacatgctggagccaagtgctaacatgccttggttcaagggatggaaagtcacccgtaaggatggcaatgccagtggaaccacgctgcttgaggctctggactgcatcctaccccaactcgtccaactgacaagcccttgcgcctgcctctccaggatgtctacaaaattggtggtattggtactgttcctgttggccgagtggagactggtgttctcaaacccggtatggtggtcaatgcaccatgaagctttgagtgaagctcttcctggggacaatgtgggcttcaatgttaagaatgtggatgtcaaggatgttcgtcgaggcaacggagctggggacagcacaaatgaaccaacaatggaagccaatggcttcactg

SEQ ID NO: 158772 - DNA, 443 bp, Homo sapiens
gcttacacactgggtgtgaaacaactaattgtcggtgttaacaaaatggattccactgagccaccctacagccagaagagatatgaggaaattgttaaggaagtcagcacttacattaagaaaattggctacaaccccgacacagtagcatttgtgccaatttctggttggaatggtgacaacatgctggagccaagtgctaacatgccttggttcaagggatggaaagtcacccgtaaggatggcaatgccagtggaaccacgctgcttgaggctctggactgcatcctaccaccaactcgtccaactgacaagcccttgcgcctgcctctccaggatgtctacaaaattggtggtattggtactgttcctgttggctttgctccagtcaacgttacaacggaagtaaaatctgtcgaaatgcaccatgaagctttgagtga

SEQ ID NO: 158773 - DNA, 665 bp, Homo sapiens
  misc_feature (1)...(665): n = a,t,c or g
agagtcncnnaggagccccccatagtacacctatagatgacctctccacttggccgaggagaaaaatggctacaaccccgacacagtagcatttgtgccaatttctggttggaatggtgacaacatgctggagccaagtgctaacatgccttggttcaagggatggaaagtcacccgtaaggatggcaatgccagtggaaccacgctgcttgaggctctggactgtatcctaccaccaactcgtccaactgacaagcccttgcgcctgcctctccaggatgactacaaaatttctggttggaatggtgacaacatgctggagccaagtgctaacatgccttggttcaagggatggaaagtcacccgtaaggatggcaatgccagtggaaccacgctgcttgaggctctggactgcatactaccaccaacttgtncaactgacaagcccttgcgcctgcctctccaggatgtctacaaaattggtgggattggtactgttcctgttggccgagtggagactggtgttctcaaacccggtatggtggtcacctttgctccagtcaacgttacaacggaagtaaaatctgtcgaaatgcaccatgaagctttgagtgaaactcttcctggcgacaatgtgagcttcaatgtcaagaatagtgtctgca

SEQ ID NO: 158774 - DNA, 394 bp, Homo sapiens
cgccgacattgaacgcctgaggatgagacgcgtaatggccgcggcgacccacgcgtccgcaatttctggttggaatggtgacaacatgctggagccaagtgctaacatgccttggttcaagggatggaaagtcacccgtaaggatggcaatgccagtggaaccacgctgcttgaggctctgaattggcggtattgggactgttcctgttggccgagtggagactggagttctcaaacccggtatggaggtcacctttgctccaggcaacgttacaacggaagtaaaatctgtcgaaaagcaccatgaagctttgagtgaagctctttctggggacaatgcgggcttcaatgtcaagaatgtgtctgtcaaggatgttcgtcgtggcaacgttgc

SEQ ID NO: 158775 - DNA, 463 bp, Homo sapiens
atgctgcttgaggctctggactgcatcctaccaccaactcgtccaactgacaagcccttgcacctgcctctccaggatgtctacaaaattggtggtattggtagtgttcctgttggccgagtggagactggtgttctcaaacctggtatggtggtcacctttgctccagtcaacgttacaacagaagtaaaatctgtcgaaatgcaccatgaagctttgagtgaagctcttcctggggacaatgtgggcttcaatgtcaagaatgtgtctgtcaaggatgttcgtcatggcaacgttgctggtgacagcaaaaatgacccaccaatggaagcagctgggtcgctttgctgttcgtgatatgagacagacagttgcggtgggtgtcatcaaagcagtggacaagaaggctgctggagctggcaaggtcaccaagtctgcccagaaagctcagaaggctaaatga

SEQ ID NO: 158776 - DNA, 845 bp, Homo sapiens
atgggaaaggaaaagactcatatcaacattgtcgtcattggacacgtagattcgggcaagtccaccactactggccatctgatctataaatgcagtagcatcgacaaaagaaccattgaaaaatttgagaaggagactgctgagatgggaaagggctctttcaagtatggctgggtcttggataaactgaaagctgagcgtgaacgtggtatcaccattgatatctccttgtggaaatttgagaccagcaagtactatgtgactatcactgatgctccaggacacagagacttcatcaaaaacatgattacagggacatctcaggctgactgtgctgtcccgattgttgctgctggtgttggtgaatttgaagctggtatctctaagaatgggcagacccgagagcatgcccttctggcttacacactgggtgtgaaacaactaattgttggtgttaacaaaatggattccactgagccaccctacagccagaagagatatgaggaaatgtggttaagggaagtcagcacttacattaagaaaattggctacaaccccgacacagtagcatttgtgccaatttctggttggaatggtaacaacatgctggagccaagtgctaacatgccttggttcaagggatggaaagtcacccgtaaggatggcaatgccagtggaaccatgctgcttgagggagcttctcagactatccacctttgggtcgctttgctgttcgtgatatgagacagacagttgcggtgggtgtcatcaaagcagtggacaagaaggctgctggagctggcaaggtcaccaagtctgcccagaaagctcagaaggctaaatga

SEQ ID NO: 158777 - DNA, 945 bp, Homo sapiens
  misc_feature (1)...(945): n = a,t,c or g
gcaatgccagtggaaccacgctgcttgaggctctggactgcatcctaccaccaactcgtccaactgacaaggccttgcgcctgcctctccaggatgtctacaaaattggtggtattggtactgttcctgttggccgagtggagactggtgttctcaaacccggtatggtggtcacctttgctccagtcaacgttacaacggaagtaaaattggttcaagggatggaaagtcacccgtaaggatggcaatgccagtggaaccacgctgcttgaggctctggactgcatcctaccaccaactcgtccaactgacaagcccttgcgcctgcctctccaggatgtctacaaaattggtggtattggtactgttcctgttggccgattggagactggtgttctcaaacccggtatggtggtcacctttgctacagtcaacgttacaacggaagtaaaatctgtcgaaaaccacttgatngccnctctgaanngncncngtantnnctgttggacccacgcgtccgagcacttacattaagaaaattggctactattcccgacacattagcatttgagccaatttctggttggaatggtgacgacatgctggagccaagtgctaacatgccttggttcaagggatggaaagtcacccgtaaggatggcaatgccagtggaaccacgctgcttgaggctctggactgcatcctaccaccaactcgtccaactgacaagcccttgcgcctgactatccaggatgtctacaaaattggtggtattggtactgttactgttggccgagtggagactggtgttctcaaacccggtatggtggtcacctttgctccagtcaacggtacaacgtaagtaaaatctgtcgcaatgcaccatgaagctttgagtgaagctcattctgtggacaatgtgggctttaatgtcaaaaatgtgt

SEQ ID NO: 158778 - DNA, 2131 bp, Homo sapiens
cgtggtatcaccattgatatctccttgtggaaatttgagaccagcaagtactatgtgactatcattgatgccccaggacacagagactttatcaaaaacatgattacagggacatctcaggctgactgtgctgtcctgattgttgctgctggtgttggtgaatttgaagctggtatctccaagaatgggcagacccgagagcatgcccttctggcttacacactgggtgtgaaacaactaattgtcggtgttaacaaaatggattccactgagccaccctacagccagaagagatatgaggaaattgttaaggaagtcagcacttacattaagaaaattggctacaaccccgacacagtagcatttgtgccaatttctggttggaatggtgacaacatgctggagccaagtgctaacatgccttggttcaagggatggaaagtcacccgtaaggatggcaatgccagtggaaccacgctgcttgaggctctggactgcatcctaccaccaactcgtccaactgacaagcccttgcgcctgcctctccaggatgtctacaaaattggtggtattggtactgttcctgttggccgagtggagactggggttcatttgtgccaatttctggttggaatggtgacaacatgctggagccaagagctaacatgccttggttcaagggatggaaagtcacccgtaaggatggcaatgccagtggaaccacgctgattgaggctctggactgcatcctaccaccaactcgtccaactgacaagcccttgcgcctgcctctccaggatgtctacaaaattggtggtattggtactggtcctgtaggccgactggagactggtgttctcaaacccggcatggtggtcacctttgctccaggcaacgttacaacggaagtaaaatctgtcgaaacgctccatgaagctttgagtgaagcttttcctggggacaatgtgggcttcaatgtcaagaatgtgtctgtcaaggatgttcgtcatggcaacgttgctggtgacagcaaaaatgacccaccaatggaagcagctggtttcactgctcaggtgattatcctgaaccatccaggccaaataagcactggctatgcccctgtattggattgccacacggctcatattgcatgcaagtttgctgagctgaaggaaaagattgatcaccgttctggtaaaaagctggaagatggccctaaattcttgaagtctgttgatgctgccattgttgatatggttcctggcaagcccatgtgtgttgagagcttctcggactatccatctttgggttgctttgctgttcgtgatatgagacagatagttacagtgggtgtcatcaaagcagtggacaagaagactgctggagctggcaaggtcaccaagtctgcccagaaagctcagaaggctaaatgactctggactgcatcctaccaccaactcgtccaactgacaagcccttgcgcctgcctctccaggatgtctacaaaattggtggtattggtagtgttcctgttggccgagtggagactggtattctcaaacccggtatggtggtcacctttgctccagtcaacgttacaacagaagtaaaatctgtcgaaatgcaccatgaagctttgggtgaagctcttcctggggacagtgtgggcttccatgtcaagaatgtgtctgtcaaggatgttcgtcgtggcaacgttgctggtgacagcaaaaatgacccaccaatggaagcagctggcttcactgctcaggtgattatcctgaaccatccaggccaaataagcgctggctatgcccctgtattggattgccacacggctcatattgcatgcaagtttgctgagctgaaggaaaagattgatcgccgttctggtaaaaagctggaagatggccctaaattcttgaagtccggtgatgctgccattgttgatatggttcctggcaagcccatgtgtgctgagagcttctcagactatccacctttgggtcgctttgctgttcgtgatatgagacacacagttgcggtgggtgtcatcaaagcagtggacaagaaggctgctggagctggcaaggtcaccaactctgcccagaaagctcagatggctaaatga

SEQ ID NO: 158779 - DNA, 1257 bp, Homo sapiens; identical to SEQ ID NO: 125428

SEQ ID NO: 158780 - DNA, 2626 bp, Homo sapiens
atgcagtcggaacgtggtatcaccattgatatctccttgtggaaatttgagaccagcaagtactatgtgactatcattgatgccccaggacacagagactttatccaaaacatgattacagggacctctcaggctgactgtgctgtcctgattgttgctgctggtgttggtgaatttgaagctggtatctccaagaatgggcagacccgagagcatgcccttctggcttacacactgggtgtgaaacaactaattgtcggtgttaacaaaatggattccactgagccaccctacagccagaagagatatgaggaaattgttaaggaagtcagcacttacattaagaaaattggctacaaccccgacacagtagcatttgtgccaatttctggttggaatggtgacaacatgctggagccaagtgctaacatgccttggttcaagggatggaaagtcacccgtaaggatggcaatgccagtggaaccacgctgcttgaggctctggactgcatcctaccaccaactcgtccaactgacaagcccttgggcctgcctctccaggatgtctacaaaattggtggtattggtactgttcctgttggccgagtggagactggtgttctcaaacccggtatggtggtcacctttggtccagtcaacgttacaacggaagtaaaatctgtcgaaatgcaccatgaagctttgggtgaagctcttcctggggacaatgtgggcttcaatgtcaagaatgtgtctgtcaaggatgttcgtcgtggcaacgttgctggtgacagcaaaaatgacccaccaatggaagcagctggcttccctgctcaggtgattatcctgaaccatccaggccaaataagcgccggctatgcccctgtattggattgccacacggctcacattgcatgcaagtttgctgagctgaaggaaaagattgatcgccgttctggtaaaaagctggaagatggccctaaattcttgaagtctggtgatgctgccattgttgatatggttcctggcaagcccatgtgtgttgagagcttctcagactatccacctttgggctgctttgctgttcgtgatatgagacagacagttgcggtgggtgtcatcaaagcagtggacaagaaggctgctggagctggcaaggtcaccaagtctgcccagaaagctcagaaggctaaatgatggtatcaccattgatatctccttgtggaaatttgagaccagcaagtactatgtgactatcattgatgccccaggacacagagactttatccaaaacatgattacagggacctctcaggctgactgtgctgtcctgattgttgctgctggtgttggtgaatttgaagctggtatctccaagaatgggcagacccgagagcatgcccttctggcttacacactgggtgtgaaacaactaattgtcggtgttaacaaaatggattccactgagccaccctacagccagaagagatatgaggaaattgttaaggaagtcagcacttacattaagaaaattggctacaaccccgacacagtagcatttgtgccaatttctggttggaatggtgacaacatgctggagccaagtgctaacatgccttggttcaagggatggaaagtcacccgtaaggatggcaatgccagtggaaccacgctgcttgaggctctggactgcatcctaccaccaactcgtccaactgacaagcccttgggcctgcctctccaggatgtctacaaaattggtggtattggtactgttcctgttggccgagtggagactggtgttctcaaacccggtatggtggtcacctttggtccagtcaacgttacaacggaagtaaaatctgtcgaaatgcaccatgaagctttgggtgaagctcttcctggggacaatgtgggcttcaatgtcaagaatgtgtctgtcaaggatgttcgtcgtggcaacgttgctggtgacagcaaaaatgacccaccaatggaagcagctggcttccctgctcaggtgattatcctgaaccatccaggccaaataagcgccggctatgcccctgtattggattgccacacggctcacattgcatgcaagtttgctgagctgaaggaaaagattgatcgccgttctggtaaaaagctggaagatggccctaaattcttgaagtctggtgatgctgccattgttgatatggttcctggcaagcccatgtgtgttgagagcttctcagactatccacctttgggctgctttgctgttcgtgatatgagacagacagttgcggtgggtgtcatcaaagcagtggacaagaaggctgctggagctggcaaggtcaccaagtctgcccagaaagctcagaaggctaaatgacgttctggtaaaaagctggaagatggccctaaattcttgaagtctggtgatgctgccattgttgatatggttcctggcaagcccatgtgtgttgagagcttctcagactatccacctttgggctgctttgctgttcgtgatatgagacagacagttgcggtgggtgtcatcaaagcagtggacaagaaggctgctggagctggcaaggtcaccaagtctgcccagaaagctcagaaggctaaatga

SEQ ID NO: 158781 - DNA, 2848 bp, Homo sapiens
atgggaaaggaaaagactcatatcaacattgtcgtcattggacacgtagattcgggcaagtccaccactactggccatctgatctataaatgcggtggcatcgacaaaagaaccattgaaaaatttgagaaggaggctgctgagatgggaaagggctccttcaagtatgcctgggtcttggataaactgaaagctgagcgtgaacgtggtatcaccattgatatctccttgtggaaatttgagaccagcaagtactatgtgactatcattgatgccccaggacacagagactttatcaaaaacatgattacagggacatctcaggctgactgtgctgtcctgattgttgctgctggtgttggtgaatttgaagctggtatctccaagaatgggcagacccgagagcatgcccttctggcttacacactgggtgtgaaacaactaattgtcggtgttaacaaaatggattccactgagccaccctacagccagaagagatatgaggaaatgtggttaagggaagtcagcacttacattaagaaaattggctacaaccccgacacagtagcatttgtgccaatttctggttggaataggtgacaacatgctggagccaagtgctaacatgccttggttcaagggatggaaagtcacccgtaaggatggcaatgccagtgcaaccacgctgcttgaggctctggactgcatcctaccaccaactcgtccaactgacaagcccttgcgcctgcctctccaagatgtctacaaaattggaggcattggtactgatcctgctggccgagtgaagactggtgttctcaaacccggcatggtggggcaccttttgctccagtcaacggtaccacggaagtaaaatctgtcgaaatgcaccatgaagctttgagtgaagcctcttgctgggggacaagggggccttcaatgtcaagaatgtgtctgtcaaggatgttcgtcgtggctaacgttgctggtgacagcaaaaatgacccaccaatggaagccagttggcttcactgctcaggtgattatcctgaaccatccaagaccaaaaaaacgcccggcatatgccccttgaattggattgccacacggctcacattgcatgcaagtttgctgagctgaaggaaaagattgatcgccgttctggtaaaaagctggaagatggccctaaattcttgaagtctggtgatgctgccattgttgatatggttcctggcaagcccatgtgtgttgagagcttctcagactatccacctttgggtcgctttgctgttcgtgatatgagacagacagttgcggtgggtgtcatcaaagcagtggacaagaaggctgctggagctggcaaggtcaccaagtctgcccagaaagctcagaaggctaaatgtctcaggctgactgtgctgtcctgattgttgctgctggtgttggtgaatttgaagctggtatctccaagaatgggcagacccgagagcatgcccttctggcttacacactgggtgtgaaacaactaattgtcggtgttaacaaaatggattccactgagccaccctacagccagaagagatatgaggaaattgttaaggaagtcagcacttacattaagaaaattggctacaaccccgacacagtagcatttgtgccaatttctggttggaatggtgacaacatgctggagccaagtgctaacatgccttggttcaagggatggaaagtcacccgtaaggatggcaatgccagtggaaccacgctgcttgaggctgtggactgcatcctaccaccaactcgtccaactgacaagcccttgcgcctgcctctccaggatgtctacaaaattggtggtattggtactgttcctgttggccgagtggagactggtgttctcaaacccggtatggtggtcacctttgctccagtcaacgttacaacggaagtaaaatctgtcgaaatgcaccatgaagctttgagtgaagctcttcctggggacaatgtgggcttcaatgtcaagaatgtgtctgtcaaggatgttcgtcgtggcaacgttgctggtgacagcaaaaatgacccaccaatggaagcagctggcttcactgctcaggtgattatcctgaaccatccaggccaaataagcgccggctatgcccctgtattggattgccacacggctcacattgcatgcaagtttgctgagctgaaggaaaagattgatcgccgttctggtaaaaagctggaagatggccctaaattcttgaagtctggtgatgctgccattgttgatatggttcctggcaagcccatgtgtgttgagagcttctcagactatccacctttgggtcgctttgctgttcgtgatatgagacagacagttgcggtgggtgtcatcaaagcagtggacaagaaggctgctggagctggcaaggtcaccaagtctgcccagaaagctcagaaggctaaatgaggtttcactgctcaggtgattatcctgaaccatccaggccaaataagcactggctatgcccctgtattggattgccacacggctcatattgcatgcaagtttgctgagctgaaggaaaagattgatcaccgttctggtaaaaagctggaagatggccctaaattcttgaagtctgttgatgctgccattgttgatatggttcctggcaagcccatgtgtgttgagagcttctcggactatccatctttgggttgctttgctgttcgtgatatgagacagatagttacagtgggtgtcatcaaagcagtggacaagaagactgctggagctggcaaggtcaccaagtctgcccagaaagctcagaaggctaaatga

SEQ ID NO: 158782 - DNA, 976 bp, Homo sapiens
acagtgcggtggaattctcagtttttgtcagcatctccaccccgaggtggtttgaactttgagccttttgtagtcctgatgaataatttcattttcctcaagtttatgacactcggaacgtcaagaactggaggtttgtgcaatttgagaccggtcggcactgtgcagagatcagagtactaagagacagagattaaaatggcttccagaggaaagacagagacaagcaaattaaagcagaatttagaagaacagttggatagactcatgcaacaattacaagatctggaggaatgcagagaggaacttgatacagatgaatatgaagaaaccaaaaaggaaactctggagcaactaagtgaatttaatgattcactaaagaaaattatgtctggaaatatgactttggtagatgaactaagtggaatgcagctggctattcaggcagctatcagccaggcctttaaaaccccaaaggtcatcagattgtgtggaaagaaaaccacccggttcagcttcggccaaggtaagcagagatggatagagatctgatggtaggaaagctggaaagagacctgtacactcaacagaaagtggagatactaacagctcttaggaaacttggagagaagctgactgcagatgatgaggccttcttgtcagcaaatgcaggtgctatactcagccagtttgagaaagtctctacagaccttggacggcccccaagttacatgaactacctgctagactcacaccccagcaaaaatattgatgtccccagcaagattagcttcctgttaaagatccaggacctgtgaatacatgcgtaactgcaagaatggaagcaaaggatgaacccaagttaaagcccagcacaagaatatgatgtaagcgcttttgggaaatgcagagattttcttttctcttcaaataataaattacatctaaaaattaatgggaaaaaaaaaaaaaaaaa

SEQ ID NO: 158783 - DNA, 1563 bp, Homo sapiens
ggcacgaggtctggaaatatgactttggtagatgaactaagtggaatgcagctggctattcaggcagctatcagccaggcctttaaaaccccagaggttatcttattgtttgcaaagaaacaaccaggtcagcttcggacaaggttagcagagatggatagagatctgatggtaggaaagctggaaagagacctgtacactcaacagaaagtggagatactaacagctcttaggaaacttggagagaagctgactgcagatgatgaggccttcttgtcagcaaatgcaggtgctatactcagccagtttgagaaagtctctacagaccttggctctggagacaaaattcttgctctggcaagttttgaggttgaaaaaacaaaaaaatgacatggtgcagaaagcttgtaacattgatcacattcttaatgtaaatggtgtctttcttctggggttttcagttattgcaaagaaatgaagagattctggaaatgcatcaataacctaagaaaaagcgacataaaaatatacttatggcttgtgtttatgctcttcatcattgtgcgttgtgtgcggttacctgcttgagtgatcctgaacttgttgcgacagagggactcactggactctgttcgttatgatttgtctgtttaagagagaaaacaaagtggacttgatttttattaaggctgtttgtttttaagtgttgatagtgaacgaaaagatgtgaagtaatgatatttttctgctttacaccttatccccactcattggagtgaacagtgtacgcaagctcaatagacttcataagtgttcatagaattttacaattctgagtgatcttagaaatcatttctgtttttacaaacaaggaaactgaggtccagaaagagcaagcgactttgcttaaagtcgcatcagagagctgagggtaagactcaggtgtcctgactcccagtttagtatcttttgaattttatttctgtaccatttaaaaaaaataattaacactatttgtgcaagtcagtgtttttgacaattcagtgtcgcaataaaaagtggactgcacactaagggaccatcccccagcctgtaagctgtctgtattaatggggcccgttgtatctcggaattttgaggttggaacaatgggagccctgttgagcgtttcctaaagtgacttagccgcctgcgttgtttgaccagggaagcaacaggaaatggcagctagaggccctccctgtgcgtgacctcttgtcacactcagaggggaggtaactgttcagctggttatctactcttcaggtgtttggacgaaacacacaaataatgttatgaggaaaaagcaaatttctctcctgagtatttacatgtctgctgtatgctcaaatatgcagaagtgtccctatgcgtgtatattagcttattttttaggctctagccattttatattctttcatgtgcttctcaatattcattttctttgcactttatacaaattaaaagcatttttaaagcttcttctgtactggaaactactaagtgctttgccaaccagacaga

SEQ ID NO: 158784 - DNA, 1028 bp, Homo sapiens
ggtttttagcttccttgcaatgggttcaaacatcctcctttagctcagagaagtttgttattaccgaccttctgaagcctacttctgtcaacttgtcaaagtcattctccgtccagctttgttccattgctgggggttccttaaggcctaccccggaaattcaagaagtgaaaactcctgaagaactagagacctttatgcttaaacatggagaaaatattattgatactttaggagctgaagtagatagacttgagaaggaactgaaatctgggagcttagtgccttgcatcccagctgctccagctgtgactaaaaggggccaaggtacagctccagctattgcttcagtaggtggaagccccaagccttggcagcttccacgtggtgttgggcctgtgggtgcacagaagtcaagaactgaggtttggaaatctctgcctagatttcagaggatgtatgggaaacacctggatgcccagaatgatagatccactgacagcttgcacagtgcacctggaaaagccacagacactcaatgccagcccctgaaagcagccaaaagtgggctatatcctgcagagctaaagaggtggagctgcccatggctgtgggagcccaccttttgcatcagcgtgacctggagtgatctagaacaacttcgaaaaatcagacgacgaagtccccatgaagatactgagtcttttactgtatacttgagatcagatgtggaagcaaaatctttggaagtttggggaagccctgaagctcttgccagagagaaaaaattgcgtaaggaagcagaaatagaatacagagaaaaagggtctattaactcagctacattaattaattcagcagatatttatccgatacccgctatgaacaagaagctgtgcttggtgtttgaaatgtatatgcaaaattatccctactatggcaaactcctgcagcccaaatacctgcagcctctgcttgctgtacagttcaccagccttaccatggacactgaaattcgcctagtgtaa

SEQ ID NO: 158785 - DNA, 828 bp, Homo sapiens
tagcccctgtggtggaattcagttataatagcagccacttgcatgggccttacttctataacaggcaatccactgtatgacagcctaggttctttgggtgtgggcaccttattaggcatggtctcagcattcctcatctacactaacacagaagcactcttagggcggtccatccagccagaacaagtacaacggctcactgaactcctggagaatgacccatcagtaagggcaattcatgatgttaaagccacagatctgggattaggtaaagtaagatttaaggcagaagtagattttgatgggcgagttgttacaagatcatatttggaaaaacaagattttgaccaaatgttacaagaaattcaagaagtgaaaactcctgaagaactagagacctttatgcttaaacatggagaaaatattattgatactttaggagctgaagtagatagacttgagaaggaactgaaaaaacgaaatcctgaagttcgacatgtagatttggagatactgtgagtttgatggaatgaatcacctgggtggggaccttggaaacaagtttgtccgtccactctacaaagtttcctcctctcctacactgaaagactcagtgccatgcagaagccttttttttaagatgaaggaaatattttatgtaaagagcaactcagcaggacacagaactaaaactactacttacatctaacagacacactacaagttgaatcaatttgaaaatcatgtttttatgcttccatagggaacattttggttatttaaattgttcataatgtcccatatttcacctgttcagtgtatactgtg

SEQ ID NO: 158786 - DNA, 587 bp, Homo sapiens
gggtcgacccacgcgtccgaaagaagacagaataaaacaaccaccaggaccaaggtcattcctgcagccagtgaagaacagcttttattagtggaattggttcgttcaatcagtgtcatgagagcagaaactgttatccagactgtaaaagaagttttaaagcagccaccagccatagccaaggacaagaaacatctttctttggaagtctgcatgcttcagtttttctatgcttatattcaaaggtaagattactgatattgatctgtccttactatgttgctagaaacagagaaacattatttatggatatattaatataagtaatgagtgtcttaacgacccagccatgtatatcctacaaacctaaagacctaaggatattgaagattcctagatagtaaaacactgaattgtgataaaatcatttaaacataaatgaaaagttgaacctactctcgaaactatgcatattgccactgaatccattattttggtataggtgaacatacagtaattcattctgcttttttaatgttaggaatgattacatgaaatatcttcttactatcatattccattttgcg

SEQ ID NO: 158787 - DNA, 4136 bp, Homo sapiens
caattccaatggttgtgtctgattttgatcttccagaccaacagatagaaatacttcagagttctgactcgggatgttcacagtcctctgctggggacaacttgagttacgaagttgatcctgaaaccgtgaatgcccaagaggattctcaaatgcccaaggaaagctccccagatgatgatgttcaacaggtagtatttgacctgatatgtaaagttgtaagtggcctcgaagtggaatctgcatcagttacatctcaattagaaattgaagctatgcccccaaagtgcagtgatatagatccagatgaagagacgattaaaattgaagatgactccattcaacagagtcagaatgctttgctgagtaatgaaagttctcagtttctgtctgtgtctgcagagggaggccatgagtgtgtggcaaatggaatctccaggaatagctcctcaccttgtatttcaggaaccacacacactcttcatgactcttctgttgcttccatagaaaccaaatctagacaaaggagtcacagtagtattcaattcagcttcaaagaaaaattatcagaaaaagtttcggagaaggaaacaatagttaaggagtcaggtaaacaaccaggagcaaaacctaaagtaaaacttgccagaaaaaaggatgatgacaagaaaaaatcttcaaatgaaaaactcaaacaaaccagtgtattcttcagtgatggtctggatttagagaactggtatagctgtggagagggagacatttctgaaattgagagtgacatgggttctccaggatctcgaaaatctcccaatttcaacattcatcctctctatcaacatgtgctcctgtatctccagttgtatgattcatccaggactttgtatgctttctctgccatcaaagccatcttgaaaactaaccctatagcttttgtaaatgccatttcaactactagtgtaaataatgcatatactcctcagttgtctctccttcagaatctattggccagacaccggatttctgttatgggcaaagatttttatagtcacattccagtggactcaaatcataacttccggagttctatgtacatagaaattcttatttctctctgcttatattacatgcgtagccattacccaactcatgtcaaggttactgcacaagatttaataggcaatcgaaacatgcaaatgatgagcatagaaattctgacactactcttcactgagctggcaaaagtaatagaaagctcagcgaagggtttccctagttttatttctgatatgttatctaagtgcaaagttcagaaagtgattcttcattgtttgctgtcatctatctttagtgctcagaaatggcatagtgaaaaaatggcaggtaagaacctggttgctgtggaagaaggtttctcagaggacagccttattaatttctcagaggatgaatttgacaatggcagcacgttgcagtcacaacttcttaaggtgcttcagaggctgattgttctagaacacagagtaatgactattcctgaagagaatgaaacaggttttgattttgttgtatctgacttagaacacatcagtccccatcaacccatgacttctcttcagtatttgcatgctcagccaatcacatgtcaaggcatgttcctctgtgcagtgatacgagctttgcatcagcactgtgcatgtaagatgcacccacaatggattggtttaatcacatctactctgccttacatgggaaaagttctgcagagagtggttgtttctgtgacactacaactgtgcagaaatttagataatctaattcagcagtacaaatacgaaacaggattatctgatagtaggcctctgtggatggcatcaattattccaccagatatgattcttactcttttggaagggattacagccattatccattactgtttgttggatccaactacacagtatcaccaacttttggtcagtgtagaccagaaacacttgtttgaagcacgcagtggaatcctctcaatccttcatatgatcatgtcctctgtgacactgctttggagcatactgcatcaagctgattcttcagaaaagatgactattgccgcatccgcatctcttaccactattaatcttggagctacaaagaacttgagacaacagattcttgaattgttgggccccatttcaatgaatcatggtgttcactttatggctgccattgcatttgtgtggaatgaaagaagacagaataaaacaaccaccaggaccaaggtcattcctgcagccagtgaagaacagcttttattagtggaattggttcgttcaatcagtgtcatgagagcagaaactgttatccagactgtaaaagaagttttaaagcagccaccagccatagccaaggacaagaaacatctttctttggaagtctgcatgcttcagtttttctatgcttatattcaaagaattccagtgcccaatttagtggatagctgggcgtcactgttgatacttctgaaagactctatacaactgagtcttccagctccagggcagtttcttatacttggggttctgaatgagtttattatgaaaaaccctagtttggaaaataaaaaagaccaaagagaccttcaggatgtaactcacaaaatagtggatgcaattggtgcaattgctggttcttctctggaacagacaacatggctgcgacgaaatcttgaagttaagccttctcccaaaataatggtagatggaaccaatttggaatctgatgttgaagatatgttatcacctgcaatggaaaccgcaaacataactccttctgtatatagtgtccatgcattgacattactctctgaggttttggctcatcttttggatatggttttctatagtgatgaaaaggagcgggttattcctttacttgtaaatattatgcattatgttgtgccctacctcagaaatcacagtgcacataatgcccctagttatcgagcttgtgtccagctgctcagcagtcttagtgggtatcagtacacacggagagcttggaaaaaagaagcttttgacctctttatggatcccagtttctttcagatggatgcctcttgtgttaatcattggagagcaattatggacaatctgatgacacatgataaaacaacatttagagatttgatgactcgtgtagcagtggctcaaagcagttcacttaatctctttgcaaaccgtgatgtggagctagaacagagagctatgcttcttaaaagattagcatttgctatttttagcagtgaaattgaccagtaccagaaatatcttccagatatacaagagagattggttgagagtctccgtttgccacaggtgccaactctccattctcaagtgttcctgtttttcagagtgttacttttaagaatgtctccccaacatcttacctcactctggcctaccatgattacagaacttgtacaagtatttttactgatggagcaggaactcactgctgatgaagatatttcacggacttcagggccctctgtggctggtctggagacaacgtacacaggaggtaatggcttctctacttcatataacagccagcggtggttaaacctctatctctctgcttgcaaatttttggatttggctctcgcattgccctctgaaaaccttcctcagtttcagatgtaccgatgggcctttattccagaagcctcagatgattcaggtttggaagtcagaaggcagggtatacatcaacgagaatttaaaccttacgtggtacgactagcaaaacttcttcggaaaagagcaaagaaaaatccagaggaagacaactcagggagaacattgggttgggagccagggcacttgctgctcaccatctgcaccgtgcgcagtatggagcagctcctgccgttcttcaatgtgctcagtcaagtcttcaacagcaaagtcacaagccgatgtggaggacactcagggagtcctatcctctactcaaatgccttccctaataaggacatgaaactggagaaccacaaaccatgttccagcaaagccaggcaaaaaatagaagagatggtagaaaaagattttctggaagggatgataaaaacttga

SEQ ID NO: 158788 - DNA, 417 bp, Homo sapiens
aaaggaattttcagagttagtagcaaggattgattacaatgatggagaattcttgttaatagaagctgctgactttctccctaaatggctggatcctgaaaatagcaccaataggggatttttctgccatggggaattgtgtattatccctgcaccaataaaatttggagcagaatcttggttacccaccacacccccaacaattccacaagcattgaatataatcacagcacattcagaaaaaatacttgcttcaaaatctataccatctgttgtgaataggcgcatcacagggtacccagaaaaaattcaggcctcacttaatcgagcacactgcttccttccagctggcattgtggcagtgctaaagcagcgccccagattggtggctgcagcagtccaggcatttttacttat

SEQ ID NO: 158789 - DNA, 437 bp, Homo sapiens
  misc_feature (1)...(437): n = a,t,c or g
ctcagggattgaggatggtattcccagggctttagggcttaggcctattggggaaggaaaacaccatggctcaccatcagctctttctggcctacaccaggatctccctactacgataatgtccgtccactctgctacagcgactcggatgcagtattactatgttttgacatcagccgtccaaagacagtggacagcgcactcaagaaggtaagactagatcaactctctaatctctaactcagcatgaggaccaagaaggaatcgggaccttgtcatgaatgccctcttgtataacatcaagaaatggaagccagggaaggaagagatttgcccaaggccacaccattagctacagctctgggactggaactttgggcttcttaccccactgcctcccgccctttttgttatcccatgctgctttgcagagggcn

SEQ ID NO: 158790 - DNA, 487 bp, Homo sapiens
  misc_feature (1)...(487): n = a,t,c or g
ggggcatggnnnnaccttgacgccngctcagatggccgtaagaaccggctcgacccacgcgtccgcggacgcgtgggcagcaggccttttgttggttgcactaactgcaaggttgctgggaagtagagtccatttggttgatgagctttgactgcggttttggaaccttacctctcctccttagcccaatatgctgtctcgggtcctattcaaataaagttatttctcctggtctcnnnnnnnnnnnnnnnnnnnnnnnnnnnngggggggggcccttttaaaagatccctgggggggcccaattttcccgggggggggaaagaaatttttttttctttttggggggggtttttaaaaccccccgggggtttttgggaaagaaccctttttttgggggggggaaatttggggnnnnnnnnnnnnnaaaattttaagcctttgggggnnnnnnnnnntttttagggggtaaggggggaaacccccccg

SEQ ID NO: 158791 - DNA, 416 bp, Homo sapiens
  misc_feature (1)...(416): n = a,t,c or g
attttttaagaaagcagggaaatgcggggggttttcccccttttccccttaaaaannnnnnnnnnccccaaaggccttaaaatttnnnnnnnnnntgggcccataatgtcccccccccaaaaaaaggttcctttccaaaaatcccaaggagggttttaaaaccccccccaaaaagaaaaaaataatttctttccaccccccggaaaaattgggccccccaagggattttttaaaagggcccccccnnnnnnnnnnnnnnnnnnnnnnnggcaatgcaaaaatgtatactttaattttaaaacccaatttttgttctcaacttgaaaagggaacacttttttgtttcacaaacaagctggtcggttggaattctttttggaacagtagtcccgcgctaaacactggttcttgcctcc

SEQ ID NO: 158792 - DNA, 240 bp, Homo sapiens
accaccaagcaattccggtttgttttcccccttttccccttaaaaatttttattttcccctaaacgcttaaattttggaaggagggtgggcccccaatttcccccccccaaaaaaagggtcctttcccaaaaatccccagggggggtttataaggcccccccaaaaagaaaaaaaatttttctttcccacccccggtaaaattgggcccccccaagggaatttttaaaagggcccccccc

SEQ ID NO: 158793 - DNA, 471 bp, Homo sapiens
tccgaaactctccgatgaacaccacgccaagctcggcacgagggtgaagactttgtaagtgtatcaccgcagcacctccataagtttttggcctccattgatctaaatattgaaaatgaaaagcaggtctataatgctgccatcaagtggcttcttgccaatcctcagcatcattccaaatggttggatgaaacacttgcacaggttcgcctgccattgttgccggttgattttcttatgggtgttggggcaaaagaacagattgtcaagcaaaatctaaaatgtagagatttactggatgaagcaagaaattaccaccttcacttgagtagcagagcagtacctgactttgaatactccattcggactaccccaaggaagcatactgctggtgtgctgttttgtgtaagtggtcgaggtggatctggtgacccctttcgcagtattgaatgctattctatcaacaaaaac

SEQ ID NO: 158794 - DNA, 399 bp, Homo sapiens
cccacgcgtccgccaatgcaggcgatagcagggccatcattgtccggaatggtgaaatcattccaatgtcccgggagtttaccccggagactgagcgccagcgtcttcagctgcttggcttcctgaaaccagagctgctaggcagggaattcacccaccttgagttcccccgcagagttctgcccaaggagctggggcagaggatgttgtaccgggaccagaacatgaccggctgggcctacaaaaagatcgagctggaggatctcaggtttcctctggtctgtggggagggcaaaaaggctcgggtgatggccaccattggggtgacccgaggcttgggagaccacagccttaaggtctgcagttccaccctgcccatcaagccctttctctcctgct

SEQ ID NO: 158795 - DNA, 919 bp, Homo sapiens
aacttgaacaccaggaaagaggataccaggtctttggaggtctagagcaggggtcagtaaactgtttttgtaaaggataagacagaacatattttaggctttgcaggacacatggtctctgctgttgcagtgtgaaagcagccatagacaatatgtaacaaatgaacatggctttgttccaataaaactttactttacaaaagcagacagcaggctggatttggcccatgagctgtagtttgacaacccttggtctagaacattctttgccaagaccagctacagagccactggagagaccttccagaagccacattgcccccacagaatacagccagctggtgcctttgtccagctgcgggtgtgagggtttactgcctctgcctcaagcaaccattacctcccactctcacccagaagcaggccctggcctggaagcccgaactccagaactccagctcttttcaggtcagctcagcttctggtctgcagctgaagagactaaaactcgcccaccccaggcaagggcgacgaagccaccaaagcccaagagttcttggcaaagaagctgcatttcctcagaggaatcagagactcctggtctacccatcgacttcccctcatgcccatacgctctcgtaaggctacccctacggagtagcttgagtagccaagaagtcagagtcccccagggatcttccagagccaagagtctgcctgccagggaatgggaagcctggccccatccagcaactgccaccgtgagggcctgggcctggccctgctcaggagtcccactcatggagaggggtggcagcaggagtgggccaggcaggtaggtccctgggcccacagacaggggtggctgggaacagaaacagaaaactgacctgtccactgatgtcaccttagggtgctg

SEQ ID NO: 158796 - DNA, 633 bp, Homo sapiens
cggtagcccacaatcaccaacgtgtggtccgagacttctcaggagctagcagatggactgagaagaggatcccagggcgacagtgtacagcaaaatggcccaccaagaaaacacattgtggagcgctatacagagttttatcatgtacccactcacagtgatgccagcaagaagagactgattgaggatactgaagactggcgtccaagaactggaacaactcagtctcgctctttccgaatccttgcccagatcactgggactgaacatttgaaagaatctgaagccgataatacggagaaggcaaataactctcaggagccttctccgcagttggcttcctcggtagcttccacacggagcatgcccgagagcctggacagcccaacctctggcagaccaggggttaccagcctcacaactgcagctgccttcaagcctgtaggatccactggcgtcatcaagtcaccaagctggcaacggccaaaccaaggagtaccttccactggaagaatctcaaacagcgctgcttactcaggatcagtggcaccagccaactcagctttgggacaaacccagccaagtgaccaggacactttagtgcaaagagctgagcacattccagcagggaat

SEQ ID NO: 158797 - DNA, 828 bp, Homo sapiens
atggcggcaaggcagccaaggcaaatgtaagaataggcgatgtggttctcagcattgatggaataaatgcacaaggaatgactcatcttgaagcccagaataagattaagggttgtacaggctctttgaatatgactctgcaaagagcatctgctgcacccaagcctgagcccggttcctgttcaaaagcccacagtcaccagcgtgtgttccgagacttctcaggagctagcagagggaccagagaagaggatcccagggtgacagtaaacacgcaaaatgggaaaatcccacctaaacgcccaccaagaaaaccacattgtggagcgctatacagagttttatcatgtacccacttcacagtgatgccagcaagaagagactgattgaggatactgaaagacttggcgtccaagggactggaaccaactccagtctcggctctttccgaatccttgccccagatcacttgggactgaacattttgaaagaatctgaagccgataatacaaagaagggccaaggaaaaagataccccttcacgtctttagtcccaaatacacaaaattaccgtgactggcaccatgaagttttcagcacgtgctcttaacgtacagtgatttatgagccttgccccccaagcagccagcacatacctttttcatttacttttttttttttcaacttcatagcaaaatctgtattaaatttgccttatgaaaaaatagaactttttctatacttttctaacaatttcctattgttgtgagaaaaggaagatgaaaatgttttgtgctagttggtagctcacaaatgtaaaaccaaaaa

SEQ ID NO: 158798 - DNA, 442 bp, Homo sapiens
caactctgcaccttcttaatctgccagtgtggctgtagtgggggagtttggccccgcccagcttggccttggtcatttgcagccaaaccctgggaagccaggctcaagtcagtggtccccggtcccagggagcagcacagtggccctgctctgccccaggcccgccactgcctcagaactgataaaattccctctatcctcccaggctcaaaatagctgcaagtggagctatattaggaaagggccagcacggagctccattccttctccatttttggccagtgctgacagctgcagggtcgtctcttgccctgaccagcccagggccccctgcagagggcagtgttggcctggcggggtgggggctgcctctgccctcccttggcagcctgctccttctttgacatttattcctgcctcctactcagctcccacgcgtccg

SEQ ID NO: 158799 - DNA, 378 bp, Homo sapiens
ctgtcttcatagttgtgcccttttaccctggctgcttatatagcctaatcttgtcatataatacctagtctcactttccccaccaggtttattcagcgtagccctgtcaccttgctgcggagccaagtggtcatccttatcttacagtgggccattgcctctactaccctggacctccgggatgccaattgtagtgtcatgaggtttgtacgagacctcattcatacaggggtagccaatgatgtaagtataaaaatgataccatttctacttaacagcttttatctcctatctctttgtcattccttaggagaaaaccagcatcccagtatttccttccttgatctatattggtagacatatatcatagtggatgtc

SEQ ID NO: 158800 - DNA, 401 bp, Homo sapiens
  misc_feature (1)...(401): n = a,t,c or g
aaagtgatctccnnnnnnnnnnnnnnnnnnnnnnnnnnnnnnnnnnnnnnnnnnnnnnnnnnnnnnnnnnnnnnnnnnnnnnnnnnnnnnnnnnnnnnnnnnnnnnnnnnnnnnnnnnnnnnnnnnnnnnnnnnnnnnnnnnnnnnnnnnnnnnnnnnnnnnnnnnnnnnnnnnnnnnnnnnnnnnnnnnnnnnnnnnnnnnnnnnnnnnnnnnnnnnnnnnnnnnnnnnnnnnnnngatagaaagcccagaaacaaactcatgtattgatggtcagttgctttttgacggtggtatcaggattacacactgtgcaaaggacagtnnnnnnnnnnnnnnnnnnnnnnnnnnnnnntcatccacatgcaggagaatgaaattagacccttatcttacaccaa

SEQ ID NO: 158801 - DNA, 358 bp, Homo sapiens
  misc_feature (1)...(358): n = a,t,c or g
nactagtaaatacttgttacctctacactttggcatctcagtgaagtccacctggagatcttcaaagggggctgctccataagcttgtatgccgggtggaacggctggaccttgcctcgcattatgctgtcggcaggtaacacaccactgcgtcaccattttggcaaggcctgacaaatgtgagatgtagaaataccagcctaacaacttttcaagtaattcctgacctcgatgggtggtttcatgcacagccagtacaactgcagctactctcccatccggtaaccgaattcatccttcctccatcacttgtcctccctttgcctggagaaagtcattttcttctttagaataagta

SEQ ID NO: 158802 - DNA, 1711 bp, Homo sapiens; identical to SEQ ID NO: 123722

SEQ ID NO: 158803 - DNA, 2691 bp, Homo sapiens
atggtgtcagacatccggaaagaagacgggatgaatgttttacctctgaagtacatcccaaatgtgggagttaacttcagctttgctggggtctatttggccagtgaaactctgcctggttccttcgcacatccggaagccacttcacggggggccgtcgcaactggaaccacacacttggcatcggcggttgagccaaatggggactcgtggtgcaagcaacgctccccacgtgttagcgtgcattatattcggatcaatatcaccggctgggtgtgcacctgctgcgatattgaacgtaatatcatgctctctccctccctgaacattaggaacaatatcacagctcgtttacgacccaaaacggggacacaaatgcccctgagagagcagcggtatactgggatagatgaaaatgctcatgtagtggagagacgtgtttttgggtaccagcccttcacctgcgtcgaccttctcaactggaaaaacaatacatcgccctataccgaaaagccacaagccctaattgatttgctccaaactgttatccagacccacaaccacacctggaccgattggcaccagttgctcattttcctctttaacagtgaagaaaggcagagagtcctccaagcagcaactaagtggctagaggaacatgcaccagctgattatcaaaaccccgaacagtatggaaggacccagttgccaggaaccgacccccagttggacccacatgaaagagaggagatgcaaaggctaaaccgagacagggaagctctcttggaaggattaatgaggggagctcagaaggccacaaacgttaacaagctctctgaggtcattcagggaaaagaagaaagtccagcacaattctacgagagactgtatgaggcctatcatatgtatactccctttgatcccgatagccctgaaaatcagcgcatgattcacatggctttagtccatcaaagtgcagaagacatgagaagaaaactgcagaaacagactgggcttgcagggaagaatccatcccaattactagaaatagctagccaggtgtttgtaaacaggtatgcagtaagccgtaaggaaaacggcaaagagaatggaggtcaggcccggccacacgccgacctgtttgtcagctgcagcaatcagaggggcccccgcaaagaggcaagggaaagggggccctgggaaagaaactcagcttggctgtcagagtttgcagcgttgatgaccttctgctgggacaccccacggcagtcgggtgtgccaagggaacagatgccctacaccgcacctggaggactgtgggtagaaggtgtccaagaagaaagctcagatctgccgacagcagacggagtttctaaaggatggcccccctgttggagggccttggcagcaactgccctgctagtacaagaagcaaataagctgactcttgggcgaaacctgaacataaaggcctcccgtgctgtggtgatgaatactaaaggacgtcattggctaacgaatgccaggctcaccaagtaccaaactttggtctgtgaaaatccccgtataaccattgaagtttgtaacaccctacaccccgccaccttgctgccggtatcagggagccctgtcgagcctgattgtgtagaagtgttggactcaattgactctagcagacctgagctccgggaccagacttgggcatcagtagactgggagccacacgtggatgggagcagcttcttcaacccccaaggagagagaggtgcagggtatgcagtgataactctggacactgttgttgaaaccaggtcgttgccccaggccacttcagcccagaaagctgaacttaatgctttcatttgggccttagaactcagtgaggaggatccagaactgcagccggccctcgctttgctgtccctgtccctgtccatgtatctggtcacggtgctgaggaacctgttcagcatcctggctgtcagctctgactgccccctccacacccccatgtacttcttcctctccaacctgtgctggcctgacatcggtttcacctcggccatggttcccaagatgattgtggacacgcagtcgcatagcagagtcatctctcatgcgggctgcctgacacagatgtctttcctgctccttgttgcatgtatagaaggcatgctcctgactgtgatggcctatgactgctttgtagccatctgtcgccctctgcactacccagtcatcgtgaatcctcacctctgtgtcttcttcgttttggtgtcctttttccttagcctgttggattcccagctgcacagttggattgtgttacaattaaccatcatcaagaatgtggaaatctctaatttggtctgtgacccctctcaacttctcaaacttgcctgttctgacagtgtcatcaataacatattcatatatttcgatagtactatgtttggttttcttcccatttcagggatctttttgtcttactataaaattgtcccctccattctaaggatttcatcgtcagatgggaagtataaagccttctccacctgtggctgtcatctagcagttgtttgctggttttatggaacaggcattggcatgtacctgacttcagctgtgtcaccaccccccaggaatggtgtggtggcatcagtgatgtacgctgtggtcaccccatgctga

SEQ ID NO: 158804 - DNA, 1296 bp, Homo sapiens
ctattgttctgaataccctgtgatgttgttcccaatatgcaaggggggagaggatgatactactctcaataccgcagggctattcacatccccagtgacatttttcctaatatctccacactttggcatctctgtgaagtctacctggagatcttcaaagggggcttctccgtaagctcgtatgccgggcggaacggctggaccttgcctagcatcatgctgtcggcaggtaacacacggctgcctcaccgttttggcaagggctctctttccttgggcgttgaagaagctgctcccatccacgtatagttcccagtctactgatgcccaaggctggtcctggaggtcaggtctgctagagtcaattgagtccaacacttctacacaatcagcctggacagggctctcataagcctcacacagtctctggtagaattgtgctggactttcttcttttccctgaatgacctcagagaccttgttaacgtttgtggccttccgagctcccctcttgaatccttccaagagagcttccctgtctcggtttagcctttgcatatcctctctttcatgtgggtccaactggaagtgggttcctggtgactgggtccttccacactcttgggggttttgataatcagctggtgcatgttcctctaaccacttagttgctacgtggagccctctccgcctttcacctttcatctctcttaaagaggaatatgagcaaccggtggcgatcagcccaggtggggttgtgggtcccattgcgatgggggtcctaagagccagggggagataggggctggctcttactccccgtaccgccgggggggggggcctcaccgccctgcgacggggctccttagagccagggagggggaggggctggctcttactcccggtatcgcaggaggtgtgtacaacccctgcgatattgggagtaatatcatcctctccccccaggatattaggaacaagatgaccgaagggatgtacacccactgcgatatcttccataatgtcatcctctaccccctggctattaggagtaacatcatagaggggtgtacactttctgtggtattgggagtcatatcctctcactgcgatattttccataatgtcatcctctaccccctggctattaggagtaacatcatagaggggtgtacattttctgcgatattgggagtcatatcctctcccgttggggcactgaggtccctgttttcttttaagctgccatcggggaccactctcggcatccacaggcccccttgtatgtggccccat

SEQ ID NO: 158805 - DNA, 319 bp, Homo sapiens
gttgatgaccttctgctgggacaccccacggcagtcgggtgcaccaagggaacagatgccctacaccggcacctggaggactgtgggtataaggtgtccaagaagaaagctcagatctgccgacagcagccttgggcatcagtagactgggaactatacgtggatgggaacagcttcttcaacccccaaggagagagaggtgcagggtgtgcagtggtaaccctggacactgttgttgaagccagatcgttgccccaggccactgcagcccagaaagctgaactcattgctttcattggggccttagaactcagtgaag

SEQ ID NO: 158806 - DNA, 993 bp, Homo sapiens
  misc_feature (1)...(993): n = a,t,c or g
ctaatatccagagcgaaagaggatgatatgactctcaatatcgcagagggtgtacacccctcctgtcctattgttctgaataccctggagaaagtccttttcttctttagaagaagtaggtccaagatcaggtgcttgagggagcactgatgcccgaaagggggcagatgctgcttttcgagcctctctctctccttgggggttgaagaagctgctcccatccacgtatagttcccagtctactgatgcccaaggctggtcccggaggtcaggtctgctagagtcaattgagtccaacacttctacacaatcaggctcgacagggctctctgcgatgagggtcccaaagccagggggggaataggggctggttctcagtccccgcctcccggggggtgcctccccccgctgtgatgggggtcctaagagccagggggggaagaggggctggctctcagtcccctcctcctgggggatgcctcccgccaatgcgatgggggtctggagcaacacgcagcctaggtctctggtgggaaacttctgatggtctcgagccaacgccttcccgaagatggtgggggagttcttgaacccttggggaagcccggtccaagtgtactgattagtgacacctgactccggatcttcccactgaaaggcaaacagcttctgcctctcaggggataatctgataggaaagaaagcgtctttcaggtccaagcaggtgaaccagctgtcctcagctggcagcaaacccaacaatgtggacgggttaggtactgttggatgtaaagtcagtgtagcttgattaagcaagcacaaatcctgtactggccggtagtccttggtccgtggcttgggaaaaggcaggaggagagtgttgcatggagactgacaaggaacaataattccaaaagttcttaggtgcttgagacggacctggataccttgaagggcttctctggngaccgggtcccgcttttttctcaccgg

SEQ ID NO: 158807 - DNA, 2457 bp, Homo sapiens
atgttgaaaaattttaagaagggatttaatggcgactatggggttactatgacaccagggaaacttagaactttgtgtgaaatagattggccaacattagaagtgggttggccatcagaaggaagcctggacaggtcccttgtttctaaggtatggcacaaggtaactggtaagtcaggacactcagaccagtttccatacatagacacttggttaccacagtgggtaagagggcaggcagcagcagtgctagtagcaaagggacagatagtcaaggaaggatcccgctccacccaccgagggaaatcaactcctgaagttctgttcgacccaacatcagatgatccattgcaggagatggcaaaagtcatcccagtggtgccctccccttaccagggagagaggctccccacttttgagtccacagtgcttgtgcctccgcaagacaaacatatccctaggccacccagagtagacaagagaggaggtgaagcctcaggagaaacccctcccttggcagctcgtttaagacccaaaacggggatacaaatgtccttgagagagcagcggtatactggaatagatgaggatgggcacatggcggagaggcgtgtttttgtgtgccagcccttcacctctgccgaccttctcaactggaaaaacaataccccgtcctgtactgaaaagccacaagctctaattgatttgctccaaactattatccagacccataaccccacttgggctgattgccaccagttgctcatgttcctctttaacacagatgaaaggcggagagtgctccaagcagcaactaagtggctaggggaacatgcaccggctgattaccaaaacccccaagagtatgtaaggacccagttaccgggaaccgacccccagtgggacccaaatgaaagagaggatatgcaaaggctaaaccgatacagggaagctctcttagaaggattagaggggagcccagaaggccacaaacataccggtgctgaacattcggtagtaaccggcccagtcgcccccttatccaaaaagactattgacatcatcggagccatgggagtttcagcaaaacaagctttctgcttgccccggacttgtactcctgggaccaaggactacaggctggtacaggatttgcgcttggttaatcaggctacagtgactttacatccaacagtacctaacccgtacatattgctggggttgctgccagctgaggacagctggttcacctgcttggacctgaaagacgctttctttagcatcagattagcccctgagaggcagaagctgtttgcctttcagtgggaagatccggagtcaggtgtcactactcagtacacttggacctggcttccccaagggttcaagaactcccccaccatcttcggggaggcattggctcgagacctccagaagtttcccaccagagacctaggctgcgtgttgctccagtacgttgatgaccttttgctgggacaccccacggcagtcgggtgcgccaagagaacagatgctctactccggcacctggaggactgtgggtataaggtgtccaagaaaaaaagctcagatctgccaacagcaggatggcccccatgtttgagggccttggcagcaactgccctgctagtacaagaagcagataagctgactcttgggcaaaaccggaacataaaggccccccatgctgtggtgactttaatgaatactaaaggacatcattggctaatgagtgctagactcactaagtaccaaagtttgctttgtgaaaatccccgtataaccactgaagtttgtaacaccctgaaccccgctaccttgttcccagtatcagagagccctgttgagcatgactgtgtagaagtgttggactcagtttactctagcagacctgacctccgggaccagccttgggcatcagtagactgggaactatacgtggatgggagcagctttatcaacccacaaggagagagatttgcagggtatgcggtggtaactctggacactgttgttgaagccagatcgttgccccagggcacttcagctcagaaagctgaactcattgctttaattcgggccttagaactcagtgaagtgcatggagcattatataaagaaaagggcctattgaactctgggggaaaagacataaaatatcaacaagaaatcttgcaattattagaagcagtatggaaaccccacaaggtggcagttatacattgcagaggacaccagcgagcttccaccttggtgactcttaaatttgagaaacattggaatagtggattaattcggagtagcggtttttgtgatccacagatgaagcacagagaaaaggatagagatggagacacaaaaacattgatctcccaagctgtagagactgggtctcctttgggaatatctacaactaccaactgcacaacaaagtag

SEQ ID NO: 158808 - DNA, 1473 bp, Homo sapiens
atgcagctgggaatccaacaggctaaggaaaaaggacaccaaaatgaagaagacacagaggttgatgaccttctgctgggacaccccacggcagtcgggtgtgccaagggaacagatgccctacattggcacctggaggactgtgggtgtaaggtgtccaagaagaaagctcagatctgccgacagcaggccttggcagcaactgccctgcgagtacaagaagcaaataagctgactcttgagcaaaacctgaacataaaggcctcccgtgctgtggtgactttaatgaatactaaaggacatcattggctaacgaatgccagactcacccagtaccagacttggctctgtgaaaatccccgtataaccattgaagtttgtaacagcctacaccccgccaccttgctcccggtatcagagagccccgtcgagcctcgttgtgtagaagtgttggacacaattgactctagcagacctgacctccggggccagccttgggcatcagtagactgggaactatacgtggatgggagtagcttcttcaacccccaaggagagagaggtgcagggtgtgcagtgataaccctggacactgttgttgaagccagatcgttgtcccaggccacatcagcccagaaagctgaactcattgctttcattcgggccttagaactcagtgaggaagaaaaggactttctccaggtagagggaaggacaagtgatggaggaaggatggattcggttaccggatgggagagtactgtgccacagctgctaggagctgcagttgtactggctgtgcaagaaaccacccatcgacatcaggagtcactggaaaagttgttaggccggtatttctacatctcgcctttgtcagctcttgccaaaacggtgaggcagcggtgtgttacctgccgacagcatgatgcgaggcaaggtccagccgttctgcctggcataggagcttatggagcagccccctttgaaggtctccaggtggacttcacagagatgccaaagtgtggaggtaacaagtatgtactagttcttgtgtgtacctactctgggtgggtggaggcttatccaacgctaactgagaaagctcgtgaagtaacccgtgtgcttcttcgagacctgattcctagatttcgaccgcccttacggatcggctcagacaaggggcctgcgtttttggctgccttgttacagaagacggcaaagatgggcacacgcagtgacacacagctagcacacataggcacagtcctgcgggacatccatgtcagtgtctgttctgatgggccgaatctaagaacaggtttgaacgtcatccttgggggtgtggagtggcagagcactcctgggaatcttgtaagaagacaaggagagacaggacttcatcttcacatctaccactggtggcaggctgtggccatcttccccgtgtacctgggctcgagcctgcacatgaag

SEQ ID NO: 158809 - DNA, 1236 bp, Homo sapiens
aaggcttgctgttgttgggatccccattcgaaaggttcccggtccccctactttgtgacctcatacaaaggcttggctaatactgcaaagtttgggatccacagtctgcaaaaccccgcagctcctaagaattttctcacctgctttctgctcttaggctccggtagagtgcaaatgacctgctttctttctgatcccaggctgcgctccccctgtcggatagtaaatcccaagtaacgtacctgcggtcggcagatctgagctttttttcttggacaccttatacccacagtcctccagatgccggagtagagcatccgttcccttggcgcacccgactgccgtggggtgtcccagcaaaaggtcatcaacgtactggagcaacacgcagcctaggtttctggtgggacacttctggaggtctcgagccaactcctccccgaagatggtgggggagttcttgaacccttgaggaagccaggtccaagtgtactgagtagtgacacctgactccggatcttcccactgaaaggcaaacagcttctggctctcaggggcgaatctgatgctaaagaaagcatctttcaggtccaagcaggtgaagcagctgtcctcagctggcagcaaccccagcaatgtgtacgggttaggtactgctggatgtaaagtcactgtagcctgcttaaccaagcgcaaatcctgtcccggccagtagtccttggtcttaggctcgggaacaggcaggaggggagtgttccatggagactgacaaggaactatcattccaaaggttcttaggcacttgagagggacctgaataccttcaagagcttctctggggaccgggtactgtttttgcctaactggctgggccccaggcttaacttcttgttttccttttagctgggggcatttgttcttccaatatcctatttctttacaataagcacactggttacactgcaagctctgacagccaggctgagtctctttcccgggtccccccttcccttgcctctttgaggagacccctccgactgctgcagctaacagctcggcgtttcgccgggcctgacgttcattctctctgcggttttccttagggcttactgcatccctgtttacaaacacctggttagctacttctaataactgtgatgtgttcgtccctgcaaacccatcctgtttctgcagttttcttctaatgtcttctgcgctttgactaactaaagccat

SEQ ID NO: 158810 - DNA, 1032 bp, Homo sapiens; identical to SEQ ID NO: 117671

SEQ ID NO: 158811 - DNA, 2800 bp, Homo sapiens
atggtgtcagacatccggaaagaagacgggatgaatgttttacctctgaagtacatcccaaatgtgggagttaacttcagctttgctggggtctatttggccagtgaaactctgcctggttccttcgcacatccggaagccacttcacggggggccgtcgcaactggaaccacacacttggcatcggcggttgaaccaaatggggactcgtggtgcaagcaacgctccccacgtgttaacgtgcattatattcggatcaatatcaccggctgggtgtgcacctgctgcgatattgaacgtaatatcatgctctctccctccctgaacattaggaacaatatcacagctcgtttacgacccaaaacggggacacaaatgcccctgagagagcagcggtatactgggatagatgaaaatgctcatgtagtggagagacgtgtttttgggtaccagcccttcacctgcgtcgaccttctcaactggaaaaacaatacatcgccctataccgaaaagccacaagccctaattgatttgctccaaactgttatccagacccacaaccacacctggaccgattggcaccagttgctcattttcctctttaacagtgaagaaaggcagagagtcctccaagcagcaactaagtggctagaggaacatgcaccagctgattatcaaaaccccgaacagtatggaaggacccagttgccaggaaccgacccccagttggacccacatgaaagagaggagatgcaaaggctaaaccgagacagggaagctctcttggaaggattaatgaggggagctcagaaggccacaaacgttaacaagctctctgaggtcattcagggaaaagaagaaagtccagcacaattctacgagagactgtatgaggcctatcatatgtatactccctttgatcccaatagccctgaaaatcagcgcatgattcacatggctttagtccatcaaagtgcagaagacatgagaagaaaactgcagaaacagactgggcttgcagggaagaatccatccccaattactacaaatagctagccaggtgtttgtaaacaggtatgcagtaagccgtaaggaaaacggcaaagagaatggaggtcaggcccggccacacgccgacctgtttgtcagctgcagcaatcagaggggcccccgcaaagaggcaagggaaagggggccctgggaaagaaactcagcttggctgtcagagtttgcagcgttgatgaccttctgctgggacaccccacggcagtcgggtgtgccaagggaacagatgccctacaccgcacctggaggactgtgggtagaaggtgtccaagaagaaagctcagatctgccgacagcagacggagtttctaaaggatggcccccctgttggagggccttggcagcaactgccctgctagtacaagaagcaaataagctgactcttgggcgaaacctgaacataaaggcctcccgtgctgtggtgactttaatgaatactaaaggacatcattggctaacggatgccagactcatcaagtaccaaactttgctctgtgagaatccccgtataaccattgaagtttgtaacaccctacaccccgcctccttgctcccggtatcagagagcactgtcgagcctgattgtgtagaagtgttggattcagttgactctagcagacctgacctccgggaccaagcttgggcatcaggagactggaaactatacgtgtatgggagcagcttcttcaacccccaaggagagagaggtctccaggtggacttcaccttcacggagatgccaaagtgtggaggtaacaagcatgtactggttcttgggcgtacctactctgggtgggtggaggcctatccaacacgaactgagaaagctggtgaagtaatccctgtgcttcttcgagatgtgattcctagatttcgaccgcccttatggatcggctcagacaacgggcctgcgtttttggctgccttggtacagaaaacggcaaagccggccctcgctttgctgtccctgtccctgtccatgtatctggtcacggtgctgaggaacctgttcagcatcctggctgtcagctctgactgccccctccacacccccatgtacttcttcctctccaacctgtgctggcctgacatcggtttcacctcggccatggttcccaagatgattgtggacacgcagtcgcatagcagagtcatctctcatgcgggctgcctgacacagatgtctttcctgctccttgttgcatgtatagaaggcatgctcctgactgtgatggcctatgactgctttgtagccatctgtcgccctctgcactacccagtcatcgtgaatcctcacctctgtgtctttttcgttttggtgtcctttttccttagcctgttggattcccagctgcacagttggattgtgttacaattaaccatcatcaagaatgtggaaatctctaatttggtctgtgacccctctcaacttctcaatcttgcctgttctgacagcgtcatcaataacatattcatatatttcgatagtactatgtttggttttcttcccatttcagggatctttttgtcttactataaaattgtcccctccattctaaggatttcatcgtcagatgggaagtataaagccttctccacctgtggctgtcatctagcagttgtttgctggttttatggaacaggcattggcatgtacctgacttcagctgtgtcaccaccccccaggaatggtgtggtggcttcagtgatgtacgctgtggtcaccccatgctga

SEQ ID NO: 158812 - DNA, 396 bp, Homo sapiens
ctcaattctgaagcttccccaatggcttaaaggactgctggccttcctggtgaagcctctgctcccaaggctgtcagctttcctcagcaacatgaagtctcggtcggctggaaaactctgggaactgcagcacgagatcgaggtgtaccgcaaaaccgtgattgcccagtggagggcgctggacctggatgtggtgctgacccccatgctgggccctgctctggacttgaatgccccaggcagggccacaggggtggtgcctgtcaccacggtgactgctgaggacgaggcccagatggaacattacaggggctactttggggatatctgggacaagatgctgcagaagggcatgaagaagagtgtgggactgccggtggccgtgcagtgtgtggc

SEQ ID NO: 158813 - DNA, 1776 bp, Homo sapiens
tgccgggcggtaggcagcagcaggctgaagggatcatggtgcagtacgagctgtgggccgcgctgcctggcgcctccggggtcgccctggcctgctgcttcgtggcggcggccgtggccctgcgctggtccgggcgccggacggcgcggggcgcggtggtccgggcgcgacagaagcagcgagcgggcctggagaacatggacagggcggcgcagcgcttccggctccagaacccagacctggactcagaggcgctgctagccctgcccctgcctcagctggtgcagaagttacacagtagagagctggcccctgaggccgtgctcttcacctatgtgggaaaggcctgggaagtgaacaaagggaccaactgtgtgacctcctatctggctgactgtgagactcagctgtctcaggccccaaggcagggcctgctctatggcgtccctgtgagcctcaaggagtgcttcacctacaagggccaggactccacgctgggcttgagcctgaatgaaggggtgccggcggagtgcgacagcgtagtggtgcatgtgctgaagctgcagggtgccgtgcccttcgtgcacaccaatgttccacagtccatgttcagctatgactgcagtaaccccctctttggccagaccgtgaacccatggaagtcctccaaaagcccagggggctcctcagggggtgaaggggccctcatcgggtctggaggctcccccctgggcttaggcactgatatcggaggcagcatccgcttcccctcctccttctgcggcatctgcggcctcaagcccacagggaaccgcctcagcaagagtggcctgaagggctgtgtctatggacaggaggcagtgcgtctctccgtgggccccatggcccgggacgtggagagcctggcactgtgcctgcgagccctgctgtgcgaggacatgttccgcttggaccccactgtgcctcccttgcccttcagagaagaggtctacaccagctctcagcccctgcgtgtggggtactatgagactgacaactataccatgccctccccggccatgaggcgggccgtgctggagaccaaacagagccttgaggctgcggggcacacgctggttcccttcttgccaagcaacataccccatgctctggagaccctgtcaacaggtgggctcttcagtgatggtggccacaccttcctacagaacttcaaaggtgatttcgtggacccctgcctgggggacctggtctcaattctgaagcttccccaatggcttaaaggactgctggccttcctggtgaagcctctgctgccaaggctgtcagctttcctcagcaacatgaagtctcgttcggctggaaaactctgggaactgcagcacgagatcgaggtgtaccgcaaaaccgtgattgcccagtggagggcgctggacctggatgtggtgctgacccccatgctggcccctgctctggacttgaatgccccaggcagggccacaggggccgtcagctacactatgctgtacaactgcctggacttccctgcaggggtcggtgcctgtcaccacggtgactgctgaggacgaggcccagatggaacattacaggggctactttggggatatctgggacaagatgctgcagaagggcatgaagaaaagtgtggggctgccggtggccgtgcagtgtgtggctctgccctggcaagaagaagtgtgtctgcggttcatgcgggaggtggagcgactgatgacccctgaaaagcagtcatcctga

SEQ ID NO: 158814 - DNA, 772 bp, Homo sapiens
aggatcagcagaaacaaacggcatgtttggaaggagggagctgagtctggtgaggaggaggtggacaggatccctgcatagagactgggattgctgtgggccgggcgagcaagctgggaaggatgtggggatgggagtgcctggaccgagcattttgtttcccagcaaaggtgatttcgtggacccctggctggggcatgagtggaaaggaccaggaagtgggggttggcctgggccaagggtggggcacccgggagagatgccactgttagagatctgagctgacctgagctgcgccaggccctacttgccccttagtggctggggctggaaaagcagggcgtaaacctccctgtttcatgccctgacgtcccatggactcactccttcccttaccaccaggcttcaggactggcagcagctatggcctctcccgtgtcctgagggtagcgaggaatcggccctgggctagtcctggctctgctgtggagtcaccaagtgccagcctgtgcccctctggggcctgattttctcatccagacagtaggggtttgaacttccctctcagagctcccatggggttgtgaagggtccacggaggggtgagatctagagggttggcagtaggggtctgatgttgctgatctccgtggctgtgaccatcatggctggtgaccacactccttctgcccagttcggctggaaaactctgggaactgcagcacgagatcgaggtgtaccgcaaaaccgtgatttgccagtggagggcgct

SEQ ID NO: 158815 - DNA, 372 bp, Homo sapiens
aaatggctgccccgacgtcagaatgatcctcccctcctgcctggcaacctcggccgccctgcggtggtcttcaccattgcccagcatgcgtgcatccacaccgagacagcggaggctccgtgccagcccctgcagcatgttgtcacacaccacacggaaggccctggccggaatttgaggggcagcgccctcagacacagccacagccacagggacctgcctgggtgcggccggtgctgacgctttctgcaggccgggtggcttccgtgcccctggtctctctctgtgcctgggcctccggctcccagccaggtcctccgacaggtggaagcgggcgggctatctgcacagggcttggtgcacctccagcag

SEQ ID NO: 158816 - DNA, 769 bp, Homo sapiens
agggtggtggcttctgttctccctggactcttgggcatctgaggcccacttaccccgccccgtaggccactgcgtgctgtgatttggtcacaccgcaggccttatgatacaacaggtcttttgtcactggatacagtggatgccagataaggtttctgaaggggagggctgctgctcttcagttcagttttacgctcccagtgaggggggaccatctctgttatttgacacctcgtatttcttacaaatctaattgtttctactcttagaaatagaatctaaccaatgcaactctgatcattatgtgctgtgctgtggaaaggaaagatttttttaaaaatcaactgggaagggttcaggaagtaaaactaggaagagaaactttttgtcctaagggaataaaactaagactaacttaaggaaaattgtgcctcgtgtattggtggcacggctggctcatttatgcaggtggtagtaaattgtgtgtagttagtatagttctccttgcagaaaaacatgggcaccgtactgggtttctcttgttcccagcctggggttttgtcctcaccattgtacagtatccattctgaacggacacacctggcattcccaggtgtttctgagagacacaggcctcgactctgagtgagtctttgtgagtgggtatggctgtcagtgcactgagaacaacacttcttgcctctcaggattttgaagcaagagcaccccgagttggcagtcctcgcagactcggttgaccttcaagagg

SEQ ID NO: 158817 - DNA, 425 bp, Homo sapiens
  misc_feature (1)...(425): n = a,t,c or g
aaaacattggtgaaagaaattgaagagtacttttaaaaaggaaagatattccatatttgtggatgggaagaatattattnnnnnnnnnnnnnnnnnnnnnnnnnnnnnnnnnnnnnnnnnnnnnnnnnnnnnnnnnnnnnnnnnnnnnnnnnnnnnngcagnnnnnnnnnnntcctannnnnnnnnnnnnnnnnnnnnnnnnnnnnnnnnnnnnnnnnnnnnnnnnnnnnnnnnnnnnnnnnnnnnnnnnnnnnnnnnnnnnnnnnnnnnnnnnnnnnnnnnnnnnnnnnnnnnnnnnnnntgacactggcataaaaacaaacagatagaccaatggatcaaaatcaagaacccaaaaacaaatccccccacctacagggaacttatttttggccaaggggcccaaaacaatacctggggaaaag

SEQ ID NO: 158818 - DNA, 410 bp, Homo sapiens
  misc_feature (1)...(410): n = a,t,c or g
acgaaaacattggtgaaagaaattgaagagtacatatttaaaggaaagatattccatatttgcggattggaagaatattattnnnnnnnnnnnnnnnnnnnnnnnnnnnnnnnnnnnnnnnnnnnnnnnnnnnnnnnnnnnnnnnnnnnnnnnnnnnnnngcagnnnnnnnnnnntcctannnnnnnnnnnnnnnnnnnnnnnnnnnnnnnnnnnnnnnnnnnnnnnnnnnnnnnnnnnnnnnnnnnnnnnnnnnnnnnnnnnnnnnnnnnnnnnnnnnnnnnnnnnnnnnnnnnnnnnnnnnntgacactggcttaaaaacaaacagatagaccaatggatcagaatcaagaacccagaaacaaatccacacacctacagtgaactcatttttgacaaaggtgccaagg

SEQ ID NO: 158819 - DNA, 501 bp, Homo sapiens
gattagttattttggattacatcatcagaaatacagacaggggcaatgataattggttagtcagatacgaaaagcagaaatgtgaaaaggaaattgaccataaggaatcaaaatggattgatgatgaagaattccttattaaaatagctgcaattgataatggtctagcatttccttttaaacatcctgatgaatggagagcatatccatttcactgggcttggcttcctcaagcaaaagttcccttttctgaagaaataagaaatttgattctaccatatatttctgacatgaactttgtgcaagatttatgtgaagatctctatgaactttttaagactgacaaaggatttgacaaagccacttttgaaagtcagatgtctgtgatgaggggtcagatcttaaaccttactcaggcattgagagacgggaagagtcctttccagctagtacagataccttgtgtgattgtggaacgcagtcaaggtggaagtcagggtc

SEQ ID NO: 158820 - DNA, 708 bp, Homo sapiens
tagaataagaagtcccaggagtcagagggccagctctcccagggtctcaagcctgccagctttcagcctggagtggtggtaatccaccctccaggggtctccagggtgccaaccgtggctctcgggacttgtcagcctccatcatcacaggagcagattccttctcatcgatctttttctccagatacagagatgggtgtgtcccctgctggctctggttctttggagaccccggctaacacacacccagcaggacctgccgggcatctgagctgccctggggtgtcacaggtgaagccagcagtggcgggtgggaagtgacgtgtcatgggtgaacagcagtggagggtggagctgttgagccagtcctgggcggcgtatggctggataggaggtgtcccaggccacactttaaatgaggtgactcgagaccctctgagatgaagggaccctgaacgttgatcattttgacctcccatctctaggagcatgtccagagtctgccattccttccagaaaggaaaaaggagaactcacatcaagatctcccttgtttagccagggaggtgggagtggggccggggggcagccaggaaacatgagcacgttcgtcatggagggcaggggctgcacgggcggccaggcagtgtgagcccatggtcagcaccagcggcgagctgtcatctccctgtgcctcagttcccttcc

SEQ ID NO: 158821 - DNA, 475 bp, Homo sapiens
  misc_feature (1)...(475): n = a,t,c or g
cggctctctgcgcaggccgagtgggccaagagaagcgaggaactccgcagctcgtcgacacgtctcgtctcctgtcccaattcagggcttgttgaggtgactcgcggtcgnggtggactcgccggcagacactgctggaacgcctggagcgcctcccactgcagacgtctgtccgcctccagccgctctcctctgacgggtcctgcctcagttggcggaatggcggccacgggagccaatgcagagaaagctgaaagtcacaatttgtgtgtgttggtggaagcccctcccggatgaaaagccttcatcaggtctggagcccggcactgtggtcataacatgagcaggcagtggatacctncttcaaggcagaagtttgaagcagattgtcctggggaaagcgggtcatccggaaaacggaccttaacaagaagctggtgcaggagctgttgctgtgttctgcanaactngagcn

SEQ ID NO: 158822 - DNA, 734 bp, Homo sapiens
  misc_feature (1)...(734): n = a,t,c or g
tagtccagtgcggtggaattccgagagccgtcccttcgtccggccctggagcattgcgtttgtcgccggtgtcgcagtgcgaggatggcgccgcgggtgtagcggctctctgcgcaggccgagtgggcccagagaagcgaggaactccgcagctcgtcgacacgtctcgtctcctgtcccaattcagggcttggtgaggtgactcgcgagtcgcgggtgactcgccggcaggacactgcctggaacgcctggagcgcctcccactgcagacgtctgtccgcctccagccgctctcctctgacgggtcctgcctcagttggcggaatggcggccacgggagccaatgcagagaaagctgaaagtcacaagtctggagcccggcactgtggtcataacagagcaggcagtggatacctgcttcaaggcagagtttgagcagattgtcctggggaagcgggtcatccggaaaacggaccttaacaagaagctggtgcaggagctgttgctgtgttctgcagagctgagcgagttcaccacagtggtggggaacaccatgtgcaccttggacttctatgaagggcaaggccgtctggatggggctctctgctcctacacggagaaggacaagcaggcgtatctggaggcagcctatgcagccggcgtccgcaatatcgagatggagtcctcggtgtttgccgccatgtgcagcgcctgcggnctccaagcggncgtgg

SEQ ID NO: 158823 - DNA, 581 bp, Homo sapiens
gtccttaaattagcttaaaatgtccctgtcctcaacagggacatttttgtttttgtttaaaaaacagggatggttggccactgcacccagccctctactttgttttttgtgcctttctcttccatagtgtccataatgatcatgcattaattactttcatagcttaaaaaaaaagttgaatgggaaaaatgggtcactgtgtatttgagaacagaactggatgcttcgtgtttggatgtgtgggtggatctgcttctttcttccatatgctctgctgtgtgctccctggctgccctgctttaattttattttgttttacacccctgcaatatccttggatgtctggcttttttttcctccaggtctgggaagccccggcactgtggtcataacagagcaggcagtggatacctgcttcaaaggcagagttttgagcaggattgtcctggggaagcgggtcatccggaaaacggaccttaacaagaagctggtgcaggagctgttgctgtgttctgcagagctgagcgagttcaccacagtggtggggaacaccatgtgcaccttggacttctatgaaaggg

SEQ ID NO: 158824 - DNA, 1374 bp, Homo sapiens
attcgagtgctccggagaacagacccgcgccccgccgtccgcgagcctcccgagagccgtcccttcgtccggccctggagcattgcgtttgtcgccggtgtcgcagtgcgaggatggcgccgcgggtgtagcggctctctgcgcaggccgagtgggcccagagaagcgaggaactccccagatcgccgacacgtctcgtctcctgtcccaattcagggcttggtgaggtgactcgcggtcgcgggtgactcgccggcaggacactgcctggaacgcctggagcgcctcccactgcagacgtctgtccgcctccagccgctctcctctgacgggtcctgcctcagttggcggaatggcggccacgggagccaatgcagagaaagctgaaagtcacaatgattgccccgtcagacttttaaatccaaacatagcaaaaatgaaagaagatattctctatcatttcaatctcaccactagcagacacaatttccccaccctgttttgggaatttaaatttggtttgtttggtggaaaccctctcccggatgaagcccttcattgaggtgccttggtccagagatcggccttgactgcccagttagagactatcccaaccatctgtgcgggaactgaccgctatgccatgtataaagtaggaccggtgctgtctgtcagtcatggtatgggcattccttctatctcaatcatgttgcatgagctcataaagctgctgtactatgcccggtgctccaacgtcactatcatccgcattggcacttctggtgggataggtctggagccgggcactgtggtcataacagagcaggcagtgggatacctgcttcaaggcagagtttaagcagatttgtcctggggaagcgggtcatccgggaaaacggtaccttaacaagaagctggttcaggagctgttgctgggtttctgcagagctgagcgagttcaccacacagtggtggggaacaccatgtgcacccttggacttctatgaaagggcaaggccgtcatggatggggctctctgctcctacacggagaaggacaagcaggcgtatctggaggcagcctattgcagcccgcgtcccgcaattattcgagatggagtcctcggtgtttgccggccatgtgcagcgcctgcggcctccaagcggccgtggtgtgtgtcaccctcctgaaccgcctggaaggggaccagatcagcagcccctcgcaatgtgctcagcgagtaccagcagacggccgcagcggctggtgagctacttcatcaagaagaaactgagcaaggcctgagcgctgccctgcacctccacagaccccctgtgatgacttgccattaaaagcattgtaccaaatcaaaaa

SEQ ID NO: 158825 - DNA, 337 bp, Homo sapiens
agcagtggtacagcttcaatgatcaacatgtcagcaggataacacaagaggacattaagaaaacacatggtggatcttcaggaagcagaggatattattctagtgctttcgcaagttccacaaatgcatatatgctgatctatagactgaaggatccagccagaaatgcaaaatttctagaagtggatgaatacccagaacatattaaaaacttggtgcaaaaagagagagagttggaagaacaagaaaagagacaacgagaaattgagcgcaatacatgcaagataaaattattctgtttgcatcctacaaaacaagtaatgatggaaaataaatt

SEQ ID NO: 158826 - DNA, 375 bp, Homo sapiens
gaaccatgagaaggatgacaacagcctcaaaatcatcagcaatgcctcctgcaccaccaactggttaacacccctggccaagggcatccatgacaactttggtatcgtggaaggactcatgaccacagtccatgccatcactgccacccaaaaaactggggatggcccctccgggaaactggggcgtgatggccgcggggctctccaaaacatcatccctgcctctactggggctggcaaggctgggggcaaggtcatccctgagctgaacgggaagctcactggcatggccttccgtgtccccactggcaacgtggcaggggtggacctgacctgccggctaaaaaaacctggcaaatatgatgacatcaaaag

SEQ ID NO: 158827 - DNA, 1185 bp, Homo sapiens
gaattcggcacgaggttcgacagtcagccgcatcttcttttgcgtcgccagccgagccacatcgctcagacaccatggggaaggtgaaggtcggagtcaacggatttggtcgtattgggcgcctggtcaccagggctgcttttaactctggtaaagtggatattgttgccatcaatgaccccttcattgacctcaactacatggtttacatgttccaatatgattccacccatggcaaattccatggcacccgtcaaggcttgagaacgggaagcttgtcatcaaatggaaatcccatcaccatcttccaggagccgaagattccctccaaaatcaaagttgggggcgatgctgggcgcttgaagtacgtccgtggagttccacttggccgtcttcaccacccatggagaaaggcttgggggcttcattttgcagggggggagccaaaagggtcaatcaatctctgcccccctctggctgatgccccccatgtttcggtcatggggtgtgaaccattgagaagtatgacaacagcctcaaggatcatcagcaatggcctcctgcaccaccaactgcttaacaacccttggccaaggtcatccatgacaactttgggtatcgtgggaaggactcatgaccacagtccatggccatcacttgccacccagaagactgtgggatgggcccttccgggaaactgtgggcgtgatgggcccgcggggctcttccagaacatcatccctgcctctactggcggctgccaaggctgtgggcaaggtcaatcccttgagcttgaacgggggaagctcacttgggcatgggcttccgtgtccccaatgccaacgtgttcagtggtggacctgacctgccgtctagaaaaacctgccaaaatatgatgacatcaagaaggttgtgaagcaggcgtcggagggcccccttaagggcatcctgggctacactgagcaccaggtggtctcctctgacttcaacagcgacacccactcctccaccttcgacgctggggctggcattgccctcaacgaccacttttgtcaaggctcatttcctggtatgacaacgaatttggctacaagcaacaggggtggtggacctcatggcccacatggcctccaaggagtaaagacccctggaccaccagccccagcaagagcacaagaggaagag

SEQ ID NO: 158828 - DNA, 374 bp, Homo sapiens
  misc_feature (1)...(374): n = a,t,c or g
cagtttgaattcagcatagactccttccagatcatcctggactccctgttgctctttggccagggctcgtccactcccatgtctgaggccttccacccaacggtcacaggcgaaagcctgtacggggacttcaccgaggccctggagcacctgcggcaccgtgtcatcgccacgcgcagtcccgaggagatccgaggtggtggcctcctcaagtactgccacctcctggtgcggggcttccggccccggcccagcaccgatgtgcgcgccctgcagcgctacatgtgctcccgcttcttcatcgactttccagacctggtggagcagcggcgcaccctagagcgctacctggaggcccacttcggtggggcaan

SEQ ID NO: 158829 - DNA, 420 bp, Homo sapiens
gagagtggagctcactgtccagtagaaatcagtgatgtagcaatgttgcagtaaatagaaatgattatatatttcaatagcttagcaagaaaacatttataatatttttttctttcatctgattaagttttgctgtctattttcttccagagagatgtggataatttgccctgcctccaacatctctttctcagctttaacaatatatctagttttgacagggtttcctgccttgctgactcttcttccctctcggacatcacctttgatggcaatcccatagctcaagagtcatggtacaaacacactgtccttcagaatatgatgcagctgcgccagctagatatgaagagaatcacggaagaagaaaggcgtatggcatctgttttagccaaaaaagaggaagagaagaagcgggaa

SEQ ID NO: 158830 - DNA, 723 bp, Homo sapiens
  misc_feature (1)...(723): n = a,t,c or g
ggaaaaacagaatcaagaaaatctcaaatctggagaatctaaaaagcttagatgtcttggatcttcatggaaatcagattaccaaaattgaaaatattaatcatttgtgtgagttgagagttttaaatcttgccaggaactttttaagtcatgttgataatcttaatgggctggattcactaactgaacttaacttgcgacacaatcaaatcactttcgtgagagatgtggataatttgccctgcctccaacatctctttctcagctttaacaatatatctagttttgacagtgtttcctgccttgctgactcttcttccctctcggacatcacctttgatggcaatcccatagctcaagagtcatggtacaaacacactgtccttcagaatatgatgcagctgcgccactaagatatggaaggagaattcacgggaagaaggaaaggcgtatggcatctgttttagcccaaaaaaggagggaagaggaaggagccgggaaagtcctaaaccattcttttgcttaaggagaagaaaagggttaaccatttaaccacgtagcttcgacagtgggacttgcaacaacgagtagccaatattgctacaaatgaagatagaaaagatttctggactctcctcaggaccctgttcagattgatgggaaggcaccctctttggctttcccagaggcccacaggggcntttaggattcagggnttcaagg

SEQ ID NO: 158831 - DNA, 384 bp, Homo sapiens
attgaaaattattgcctgcctgtccctaattaccaacaacatggtgggtgctattacaggaggcctgcctgagcttgcaagcaggttaacaaggatttcagctgttctacttgaaggcatgaacaaagagacctttaacttgaaggaagtcctgaattctattggtattcagacttgtgttgaggttaacaagaccctgatggaaagaggtttacccactttaaatgctgagattcaagctaatcttataggtcaattttcaagcattgaagaggaggacaatcctatctggtccttgattgataaacgaattaagctttacatgagaaggctactttgtcttccaagccctcaaaaatgcatgcctcctatgccaggaggcct

SEQ ID NO: 158832 - DNA, 430 bp, Homo sapiens
gaaagagtgggtaatgtgtgttcactggaaatttctaacattcaaaaaggagaagggggagagtacatgtgtcatgctgtaaacatcataggggaagcaaagagctttgcaaatgtagacataatgccccaggaagaaagagtggtggcactaccacctccagaattttgtagatccaaatatggattcaagggagggagaagacaaagaactaaaaattgatttagaagtatttgaaatgcctcctcgctttataatgcctatttgtgattttaaaattccagaaaattcagatgctgtattcaaatgttcagtcatagggatcccgactcccgaagttaagtggtataaagaatatatgtgtattgagccagataatattaaatacgtgattagcgaggagaagggaagtcacactcttattattcgg

SEQ ID NO: 158833 - DNA, 12064 bp, Homo sapiens
atggtggtggagtggctccatgatggaaagccacttgaagcagccaacaggctccgtatgatcaatgaatttgggtactgcagccttgattatggcgttgcatattctagagacagtggtatcattacttgcagagccactaacaaatatggaacagatcacacatctgctacccttattgttaaagatgagaaaagtcttgtggaagaatcccaattgcctgaggggaggaaaggcttacagagaattgaagaattagagagaatggctcatgaaggtgcacttacaggtgtaacaacagatcagaaagaaaagcaaaagccagacattgtcttgtacccagagccagttagagtacttgaaggggagactgcaaggttccgctgcagggtaacaggctaccctcagcccaaagtcaactggtacctcaatggacagctcatccgcaaaagcaaaaggttcagagttcgctatgatggtatccattacctggacatcgtggactgcaaatcatatgacacaggtgaagtgaaggtcaccgcggaaaatcctgaaggtgtgatagagcataaagtgaagcttgagattcaacagagggaagattttaggtctgtccttaggagagctcctgaaccaaggcctgagtttcacgtacatgaaccaggaaagcttcagtttgaagtacaaaaagtggatagacctgttgacaccactgaaaccaaagaagttgtgaagttgaaaagggctgaaagaattacccatgaaaaagtgcctgaagagtcggaagagctgcgcagtaaattcaagcgcagaacagaagagggctattatgaagccattaccgctgtggagctcaagtctcgaaagaaggatgaatcctatgaggaactcctcaggaagacaaaagatgaacttctccactggaccaaagagttaactgaagaggaaaagaaagctcttgccgaagaaggcaaaatcacgattccaacttttaaacctgacaagattgaactaagtcctagtatggaggctccaaaaatcttcgaaagaatccagagccaaacagtgggccaaggatctgatgcacacttccgggtcagagtcgtggggaaaccagaccccgaatgtgaatggtacaaaaatggtgtcaaaattgaacggtctgaccggatctactggtactggcccgaagacaatgtttgtgaattggtcataagagatgtgactgctgaggactctgccagcatcatggtaaaagccatcaacatagctggagaaacctccagtcacgcattcttacttgtccaagccaagcaattgatcactttcacacaggaattacaagatgttgttgctaaggaaaaagacactatggcaacctttgaatgtgaaacttcagaaccatttgtcaaagtgaaatggtataaagatggtatggaggttcatgagggagataaatacaggatgcactctgacagaaaggttcacttcctctccatactgaccattgatacgtctgatgctgaagattacagctgtgtacttgtggaagatgaaaatgtcaaaacgactgctaaacttattgttgaaggtgcagttgttgagtttgtgaaagaacttcaggacatagaagttccagaatcatattcaggagaattagagtgcattgtatccccagaaaatatagaaggaaaatggtatcataatgatgtggagcttaaatccaatggcaaatatacaattacatctcgtcgtggacgtcagaacctcacggtcaaggatgtaaccaaggaggaccagggagaatacagctttgtcatcgacgggaaaaagacaacctgtaaattaaagatgaaaccccgccccattgctatcctacaaggacttagtgaccaaaaagtctgtgagggtgacattgttcagcttgaagttaaagtctccttggaaagtgtggaaggcgtctggatgaaagacggccaagaagtgcagcccagtgacagggttcacattgtgatagacaaacaatctcatatgctgctcattgaagacatgactaaggaagatgctggaaattactctttcaccattccagcccttggcctctccaccagtgggcgtgtctctgtctatagtgtggacgtgataacacctctaaaagatgttaatgtgattgaaggcaccaaggctgtgcttgaatgtaaggtgtcagtccctgatgtgacttctgttaagtggtacttaaatgatgaacaaatcaagcctgatgaccgtgtacaggccattgtgaaaggtactaaacagcgactagtcattaaccgaactcatgcttcagacgaaggaccttacaagctgatagttggcagagttgaaaccaactgtaatctctctgtagaaaaaattaaaattatcagaggtcttcgtgaccttacctgtacagaaactcaaaatgtggtgtttgaggttgagctgtcccactctggaattgatgtcctgtggaattttaaggacaaggaaatcaagcccagttctaaatataaaattgaagcacatggaaaaatatataaattgacagttctaaatatgatgaaagatgatgaaggaaaatacacattttacgcgggagaaaatatgacatctggaaaacttactgtggcaggtggggccatctccaagccactcacagatcagaccgtagctgaatcccaggaagctgtgtttgaatgtgaagttgccaacccagattccaaaggcgaatggttgagggatggcaaacacctaccactgactaacaacatcagaactgtcaaaattaagaagactctgaagaacctcacagtgacagaaacacaggatgctgttttcactgtcgagcttacacaccctaatgtcaaaggtgtccagtggatcaaaaatggagttgtgctggaatccaatgaaaagtatgctatctctgtcaaaggaacaatttactctctgaggattaaaaactgtgccatcgtggatgagtctgtttatggcttcaggcttggaaggcttggagccagtgccagactgcacgtggagactgtcaagatcattaaaaagccaaaggatgtgacagccttggaaaatgccactgttgcctttgaagttagtgtttcccatgacactgttccagtaaaatggttccataagagtgtggaaattaagccaagtgacaaacacagactggtctcagaaaggaaagtccacaagctgatgctgcagaacatctccccctcagatgctggggaatacacagctgtggtcgggcaattggaatgcaaagcaaaactgtttgtggagacattacatattacaaaaaccatgaaaaatatcgaggtgcctgagaccaaaactgcctcttttgagtgtgaggtgtcccacttcaatgtcccttccatgtggctgaagaatggtgtggaaattgagatgagtgaaaagttcaagatagttgtgcagggaaaactccatcagctgatcatcatgaacaccagcacagaggactcggcagaatacacatttgtctgtggcaatgaccaagtcagtgccaccctgacagtcaccccaatcatgattacttccatgctgaaagacatcaacgctgaagaaaaagacactattacttttgaggtgacagtgaactatgaaggcatctcttacaaatggttaaagaatggtgtggaaatcaaatcaactgacaagtgccagatgagaaccaaaaagctcacacactcactgaacatcaggaatgttcactttggggatgctgctgactacacctttgtggctggaaaagcaacatcaacagccacactttatgtggaagctcgtcatatagaatttaggaaacacattaaggacattaaggtactggagaagaagcgagccatgtttgaatgtgaagtttctgaacctgacatcactgtacagtggatgaaagatgaccaggaactgcagatcacagacagaataaagattcagaaggagaaatatgtccaccgccttctgatcccatccacccggatgtctgatgctgggaagtacacagtggtggcaggaggcaacgtgtcaactgcaaaactctttgtagaaggcagagatgttcgcatccgaagtattaaaaaggaggttcaggtcattgagaaacagcgtgctgttgttgaatttgaggtcaatgaagacgatgttgatgcccactggtataaagatggcattgaaatcaatttccaagttcaagaacgacacaaatatgtagtggaaagaagaatccaccgaatgtttatctctgagaccagacagagcgatgcaggagaatacacctttgtggcaggaaggaacaggagttctgtcactctctatgtcaatgctcctgaaccgccccaagttctgcaggagctccagcctgtcactgtgcagtctggcaagcctgcccgcttctgtgccgtgatatccggaagaccacagcccaaaatttcctggtacaaggaagagcagctgctttccactggcttcaagtgcaaatttcttcatgatgggcaagaatacacgcttttgctaattgaagccttcccagaggatgcggcagtctatacctgtgagcccaagaatgactatgttccagaagttgtgtctcctgatcaggaaatgcctgtttatccacctgccatcatcaccccgcttcaggacactgtcacttctgaagggcagccagcccgttttcaatgccgggtttctggaacagatctaaaagtgtcgtggtacagcaaagacaagaaaatcaagccatctcggttctttagaatgactcaatttgaagacacttatcaactggaaattgccgaagcttatccagaagatgaaggaacttacacgtttgttgctagtaatgctgtaggccaagtatcaagcacagccaacctgagtctggaagtttcatttaagaaggagccccttggccaaaagcccagcttcatccagcctctgtcaagcctcagggtgcacaacggggagacagtcagatttcatgcgagggtttctggcattcccaagccagaaatccaatggtttcataaccagcagctaattctaccaacaaaagatgtagttttccattttgaggagtccacaggcatggctttaatgcttatagttgatgcttactcagagcatgctgggcagtactcttgcaaagcagccaatagtgctggggaagccacttgtgcagctacactcacagtgactccaaaagtgcaagccctagataggcaaagttctgggaaagatgtaagagagtccgccaagtcccaggcagtggcagattcctctttcacaaaggaggagagcaaaatatctcaaaaggaaattaagtcatttcaaggatcatcatatgaatatgaagtgcaggtttttgaaagtgtatctcaaagttccatccacacagctgcatctgttcaagatacacagttgtgccatactgcatccctttcacaaattgcagaaagcactgagctatctaaggaatgtgctaaagagtccacggatgattctttcattgatgtaacctggactcacgaaggtgcaaagatagaggaatccgagagactgaaacaatcacaaaatggaaatattcagtttcttaccatatgtaatgttcagctggtagaccaaggactatacagctgcattgtacacaatgactgtggagagaggacaacgtcagcagtactaagtgtagaagctcctgaatcaattttgcatgagaggattgaacaagagattgagatggaaatgaaagaattattctctgagggggaatctgaacattcagaaagggatacacgtgacgccttttcagattctgaagacatagaccacaaatccatggctgctaaaagatatgcaagtagaatatcatctacaagctcctggcctgaatattttaagccttcttttacccagaaacttacatttaaatatgttttagagggtgaaccggttgtttttacatgtagattaattgcctgtccaactccagaaatgacttggtttcataacaatcggcccatcccaacaggtcttcgtcggattataaaagctgagagtgatttacaccatcactcttccagcttagagattaaaagggtccaagacagagattctggaagttataggttactagcaattaatagtgaagggtctgcagaatcaactgcatcattgcttgttatccaaaaagggcaagatgagaaatatttagaatttctgaaaagagcagaacggacacatgaaaatgtggaggctttagttgaaaggggagaagataggataaaggttgacctgaggtttactggctctccctttaacaaaaaacaagatgtggaacaaaagggaatgatgagaactatacattttaagacaatgagttctgccaagaaaacagattacatgtatgatgaagaatatttagaaagtaaatctgacataagaggttggcttaatgtaggtgaaagtttcctggacaaggagaccaaagtgaagttgcaacgtttaagggaggctagaaaaacattaatggagaaaaagaaattatctcttttagatacgtcttctgaaataagctcaagaactttgagaagtgaagctagtgataaagatattctgttctctagagaggacatgaaaatcagatctatgtctgatctagctgaaagttataaggtagatcattcagctgagagtattgtgcaaaatccacatgccctttctaatcaaatggatcaaaatatagaatctgaggaacttcccacaagctttcaaactattgttgatgaagaaattttccagactgaaataagaatgagccaagaagcactggtaaaggaaagtctaccaaaagaccatttatatggtgaaattctagtaaatgaaaatacccaagcaagaggacagctggaagaaattatggccaatactacaattggagagtcatccacatatatcactaatgtatgtgagaaggaggaagtatatgagactcctgaaaatgtgtctcaagctattacaccacatgccagcgaatcttttggtacacttgtaaatgttgaagaaagtgaagaaatagctagtgaaagaataaaaaaggatgatttgagagaattacaactctctgcttctacacgaattgatgaattcaaaaccgaacagaaggaagaaaacatgagattttttgaaaattcttttcgaaaacgcccacaacgttgcccaccttcatttcttcaagaaattgaatctcaagaagtttatgaaggtgacagttgtaattttgtgtgtcattttcaaggatatcctcaacctatagtgacgtggtataacaatgacatgccaatcccacgtaatcaaaactttatcattcattcgttggaaaactattcaatattaactctttcatctgttcatcatcagaatgaaggttctattacttgtgtgctatttaaccaatatggaacagtaaaaacaaccagtatgcttaaagtgaaagcaaaacaaaaacatgatgtcaaagcacataaagtcccagtgttccatgactacttggatgaggaagaagagttagcattggtgtttgaccaagcaaaaggcgcccatccatctatgagtcaagagggccaaacaaatcttcatttgttaaaaactaacccaccagttcctccctctggagacacagaattgctttcctttcctgtagaaattcaggtaacagcagctactcctatcccagaacaggataaagagtctaaagaagtgtttcaaactgaggagctggaacctaaagcaatgcctcaagatcaagttactcaatcaccaaaacacagatttgtatttttgtctgatattactaatgaaccaccaaaaatgttacaagaaatgccaaagcatgccaggtgtagagaaggggattccatcattcttgaatgtttaatatctggtgagccccagccagttgtaacatggtttcaaaatggagtccttttaaagcagaaccagaagtttcagtttgaagaagttaattgtagccacaaattatatattaaggatgttaattctcaagattctggaaaatataaatgtgttgctgaaaacaattcaggggcagttgaaagtgtttcagatctaacagtggagcctgtcacttatagagaaaatagtcaattcgaaaatattggtgaaatttatggaaaatattccagagatcagcaactgcaagaccagggagaatctgtaagggcacatttttatgattatccagctggtccctttactccctggacaaatgtaaaagaatattcagtaagggactattttcaaagccttgagactattgagcaaatagaccagaaagagcaggtgcgttgcataccttctagagaaaaaattcccagatttgtgcatggtgcttcaagaaccataaaaatcagcaagcccatcagggctgaattcatacaatgtcaggctgaagggaaagagagacatgtaagtgaaaaatcaaagctgcaccaagcagagggtactgtttatccatttgttgatgatttcagtgatgtcactattaagaaagaaataagaaataattttggaaaacttggtagatcagaaaaggaaaatgtacaagaatgtgcccaaagtgactatttaccaaatattcactctgagagaatttctgacagttacaatacaaaagattcatctgccattgtatatgaagaatcccttggtgaagagatacactacccggggaaaaaggtgaagcatagaattatcgaatttgaaaaattacatgtagaaaaaggagttctagaaaaaagacctaccagaacatcaattgttaatcctcctcaaaagaagattgatgacaaagccttttcattaaagcaaagagaatcaagatcaagcaatctaaatgcaaatatgtatcaggcagagaaaatgtctccaaatactgaatcagattcatctaacattgcaataaatttaaagctgctttcctctcaaactcataaagaatttgacgcacaagaaagggaacaacaggaaaaaataagtcttatagataaacctgcaatttctaaaagagctgaacatgaatcacctattacatttgacttaaagcagtttcacactcaaataaaacacacagatgtgaaattccaagaattagatagtggtcaaccagaagaagcttattttaaaatccaacatcctgctgacactgagaacattgtatttgatctaaaacaaatgtattctcatataggagatccagctctggagttccaagggcaagaaactagggaacagcaggaaatacattataaagaaaaaattcctagccctgaaacgttacaacctgacacacacaatatctctaaaagtgtgcaaaataatgtatttgccagtcaagaaatttcttccagtcaagagctttcaaatagaactatggtggagaaaagtagtattgatgaaaattccatttctttagaaaaagaagtccgacatgtacaggaacaaaacttagacattttaaaaactgatctttctcttaaatccttttctgaagaaatctatagtgaatcatgtgccctacttccaacctcatctgcagatatagaagaaactgatctttctgagaaaagttgtcctctagaaaatggaggcagaagttccatctcacatttgaaaaaagcagcaagtgaggaaaagcctttaggggttggtgaaatggaagaagaatgcactctagaaccagagttggcagcatttccaaagcaggatggtgggacacaggaatatacagatgccactttggaagaccacagaggtgatgttcaggaagctgacacactccatagacagctctccctgagtcagtgcttcccactcttgatgactgaagaacaacagaatccaggtgaacaaataagtacaaacattcatgcctctggagaagaaaaatgttatgaagaagttcaagttcagaatgaagcttctttctccactttagaaggagaaatgatagaaactagtttttctcaaaatattcctaaattagatgaggcacataccactgaggcagcagaatctgagacctccctaacacaatatttacttgctgctggaaagcgtgaggttcctgaaactaaagacaccagagaccaggcaaagcttgtccagagtgaatcaatcacttcaatggaggtggaagaagtaactttcaacactgtgtatgaatactacaaccagaaacaggaatcactaggtcgtccactttctcctgagtctgacatttccattggtgtgggaagtacaaccagtgaagaaatatctgagttagatcagttttataccccaccatcatctgttgaatattttgaatctccaaagtcccctgacttatattttaatccttcagatataactaaacaatcctcaatacattcaggaggtgagacagttgaaagatattccacacctttaggggaagttgctgaaagatattcaacaccttccgaaggtgaggtaggagaaagatactccacacccccaggggagacactagagagatactccacacctccaggagagactctagagagatactccacacccccaggagagactctagagagatattccacacccccaggagagactctggagagatactccacacccccaggagagactctagagcgatattccacacccccaggggaggcactagagagatattctattcctactggaggaccaaaccccactggtacttttaaaacatatccatcaaaaatagaaagggaagacggtacaccaaatgagcatttctacacacctacagaagagaggggttcagcttatgaaatatggcgttccgattcatttggtacacccaatgaagccattgagccaaaagacaatgaaatgcctccatcttttattgaacctctgaccaaaaggaaggtatatgaaaacacaacactaggcttcattgttgaagttgaaggtcttccagttcctggtgtgaaatggtatcgaaataaatctttactagagccagatgaaagaatcaaaatggaaagagtgggtaatgtgtgttcactggaaatttctaacattcaaaaaggagaagggggagagtacatgtgtcatgctgtaaacatcataggggaagcaaagagctttgcaaatgtagacataatgccccaggaagaaagagtggtggcactaccacctccagtaacacatcagcatgtcatggagtttgatttggaacacaccacatcatcaagaacaccttctcctcaagaaattgtcctggaagttgaattaagtgaaaaagacgttaaagaatttgagaagcaggtgaaaatagtgacagttcccgaatttactcctgaccataaaagtatgattgtgagtctagatgttcttccatttaattttgtagatccaaatatggattcaagggagggagaagacaaagaactaaaaattgatttagaagtatttgaaatgcctcctcgctttataatgcctatttgtgattttaaaattccagaaaattcagatgctgtattcaaatgttcagtcatagggatcccgactcccgaagttaagtggtatatagtgtatatgtgtgttgagccagataatattggggacgtgattagcgaggagaagggaagtcacactcttaccactcgaaatgtctgtctttctgatagtgcaacatacaggtgcagagctgtgaattgtgtaggagaggctatctgtcggggattcctcaccatgggagattctgaaatatttgctgtgatagcaaagaaaagcaaagtgactttaagcagtttaatggaagaattggtcttaaagagcaactacacagacagtttttttgaatttcaggtggtggaagggcctcccaggtttatcaaaggtatttctgactgttatgcaccaataggtacagcagcatattttcagtgcttag

SEQ ID NO: 158834 - DNA, 383 bp, Homo sapiens
  misc_feature (1)...(383): n = a,t,c or g
cgacgacacccgctaccacaccatgcaggcagccgtggatgccgtggcccgggtcactggccagcaccccgaggtgccccccgccttttggaacaatgccttcacgctgctgtctgccgtgagcctgccccgccgggagcccaccgtctccagcttctatgtgaagcgggcggagctgtgggacacctggaaggttgctcacctgaaggagcacaggagggttttccaggccatgtggctcagcttcctcaagcacaagctgcccctcagcctctacaagaaggtgctgctgattgtgcatgacgccatcctgccgcagctggcgcagcccacgctcatgatcgacttcctcacccgcgcctgcgacctcgggggggccctcn

SEQ ID NO: 158835 - DNA, 1683 bp, Homo sapiens
aaaaggcctaagttaaagaaagcaagtaaacgcatgacctgccataagcggtataaaatccaaaaaaaggttcgagaacatcatcgaaaattaagaaaggaggctaaaaagcagggtcacaagaagcctaggaaagacccaggagttccaaacagtgctccctttaaggaggctcttcttagggaagctgagctaaggaaacagaggcttgaagaactaaaacagcagcagaaacttgacaggcagaaggaactagaaaagaaaagaaaacttgaaactaatcctgatattaagccatcaaatgtggaacctatggaaaaggagtttgggctttgcaaaactgagaacaaagccaagtcgggcaaacagaattcaaagaagctgtactgccaagaacttaaaaaggtgattgaagcctccgatgttgtcctagaggtgttggatgccagagatcctcttggttgcagatgtcctcaggtagaagaggccattgtccagagtggacagaaaaagctggtacttatattaaataaatcagatctggtaccaaaggagaatttggagagctggctaaattatttgaagaaagaattgccaacagtggtgttcagagcctcaacaaaaccaaaggataaagggaagataaccaagcgtgtgaaggcaaagaagaatgctgctccattcagaagtgaagtctgctttgggaaagagggcctttggaaacttcttggaggttttcaggaaacttgcagcaaagccattcgggttggagtaattggtttcccaaatgtggggaaaagcagcattatcaatagcttaaaacaagaacagatgtgtaatgttggtgtatccatggggcttacaaggagcatgcaagttgtccccttggacaaacagatcacaatcatagatagtccgagcttcatcgtatctccacttaattcctcctctgcgcttgctctgcgaagtccagcaagtattgaagtagtaaaaccgatggaggctgccagtgccatcctttcccaggctgatgctcgacaggtagtactgaaatatactgtcccaggctacaggaattctctggaattttttactatgcttgctcagagaagaggtatgcaccaaaaaggtggaatcccaaatgttgaaggtgctgccaaactgctgtggtctgagtggacaggtgcctcattagcttactattgccatccccctacatcttggactcctcctccatattttaatgagagtattgtggtagacatgaaaagcggcttcaatctggaagaactggaaaagaacaatgcacagagcataagagccatcaagggccctcatttggccaatagcatccttttccagtcttccggtctgacaaatggaataatagaagaaaaggacatacatgaagaattgccaaaacggaaagaaaggaagcaggaggagagggaggatgacaaagacagtgaccaggaaactgttgatgaagaagttgatgaaaacagctcaggcatgtttgctgcagaagagacaggggaggcacttctgaggagactacagcaggtgaacagtctacaaggtcttttatcttggataaaatcattgaagaggatgatgcttatgacttcagtacagattatgtgtaacagaacaatggctttttatgatttttttttttaacat

SEQ ID NO: 158836 - DNA, 2583 bp, Homo sapiens
tggacagaaaaagctggtacttatattaaataaatcagatctggtaccaaaggagaatttggagagctggctaaattatttgaagaaagaattgccaacagtggtgttcagagcctcaacaaaaccaaaggataaagggaagataaccaagcgtgtgaaggcaaagaagaatgctgctccattcagaagtgaagtctgctttgggaaagagggcctttggaaacttcttggaggttttcaggaaacttgcagcaaagccattcgggttggagtaattggtttcccaaatgtggggaaaagcagcattatcaatagcttaaaacaaggaacagatgtgtaatgttggtgttatccatgggggcttacaagggagcatgcaagttgtccccttggaccaaacagatcacaatcatagataagtccgagcttcatcgtatctccacttaattcctcctctgcgcttgctctgcgaagtccagcaagtatttgaagtagtaaaaccgatgggaggctgccagtgccatccttttccaggctgattgttcgacaggtagtactgaaatatactgtcccagggctacagggaattctctgggaattttttacttatgcttgctcagaggaaggaggtatggcaccaaaaaggtgggaatccccaaatgtttggaaggtgctgccaaactgctgtggtctgagtggacaggtgcctcattagcttactattgccatccccctacatcttggactcctcctccatattttaatgagagtattgtggtagacatgaaaagcggcttcaatctggaagaactggaaaagaacaatgcacagagcataagaggtgagaattgtgtgtcgctgctgtcttcatcagctgacaggccagtggagctcttacctgtttacatgggcttgctttctttcccagccatcaagggccctcatttggccaatagcatccttttccagtcttccggtctgacaaatggaataatagaagaaaaggacatacatgaagaattgccaaaacggaaagaaaggaagcaggaggagagggaggatgacaaagacagtgaccatgaaactgttgatgaagaagttgataagaagttggattccatgggttccaagagaagaagagctacctccccttccagcagtgtcagcggggactttgatgatgggcaccattctgtgtcaacaccaggcccaagcaggaaaaggaggagactttccaatcttccaactgtagatcctattgccgtgtgccatgaactctataataccatccgagactataaggatgaacagggcagacttctctgtgagctcttcattagggcaccaaagcgaaggacagattcagaaatatatgaagatgcagtagaacttcagcagttttttattaaaattcgtgatgaactctgcaaaaatggagagattcttctttcaccggcactcagctataccacaaaacatttgcataatgatgtggagaaagagagaaaggaaaaattgccaaaagaaatagaggaagataaactaaaacgagaagaagaaaaaagagtagaaggaatcatacagagattacactactgtacaaacccagattcaaaaccaaagtatcctgcccaacgaacaccacagatacatcttcagggagaagtcctcttctacgaaagtaaattcagaacactggaagaagtgactgttgtactagacacacatataatatcaataaatcaaccagactattatgaagtggtttctcagcccattgacttgatgaaaatccaacagaaactaaaaatggaagagtatgatgatgttaatttgctgactgctgacttccagcttctttttaacaatgcaaagtcctattataagccagattctcctgaatataaagccgcttgcaaactctgggatttgtaccttcgaacaagaaatgagtttgttcagaaaggagaagcagatgacgaagatgatgatgaagatgggcaagacaatcagggcacagtgactgaaggactcctgaaaatctcgataactcaaaaaatacgcccggtagtgatcttatttcattatggtgaaagttggaacctcttacgtgccgatcaacgtctcattttcgccaaaagttggcccagggcttcccggtatcaacagggacaccaggatttatttattctgcgaagtgatcttccgtcacaggtatttattcgcgataagctcatggagcggcgtaaccgtcgcacaggaaggacagagaaagcgcggatctgggaagtgacggacagaacggtcaggacctggattggggaggcggttgccgccgctgctgctgacggtgtgacgttctctgttccggtcacaccacatacgttccgccattcctatgcgatgcacatgctgtatgccggtataccgctgaaagttctgcaaagcctgatgggacataagtccatcagttcaacggaagtctacacgaaggtttttgcgctggatgtggctgcccggcaccgggtgcagtttgcgatgccggagtctgatgcggttgcgatgctgaaacaattatcctga

SEQ ID NO: 158837 - DNA, 366 bp, Homo sapiens
  misc_feature (1)...(366): n = a,t,c or g
cgtgttcctcagcgagcaggatgaggtgctactgatccaggaggccaaaagggagtgccgggggtcgtggtacctgcctgcggggagaatggagccaggggagaccatcgtggaggcgctgcancgggaggtgaaggaggaggcggggctgcactgtgagcccgagacactgctgtccgtggaggagcggggcccctcctgggtccgcttcgtgttcctcgctcgccccacaggtatggcccacctggaggcagtgtgaacagggccagttgacacctttcccccagctcctcggtgaggtgagcccctctacagccagtcctgttatggctggcacagcctggcatgggcagattccagcctttg

SEQ ID NO: 158838 - DNA, 359 bp, Homo sapiens
cgaaccctgctagttcccggtcttgggggtcagcggaaaccgcccccatttcggcctggaggggcgaatggggacaaagccccgccgcccgccccgaccccacctggtatccccaggtgcgctgcccaggagtctcttggggccgctgcaagtgggcaggtgccctggtgttctcgtgggccggccccaggccctttgcggagcgtgtgccgcgctgaaggaaggggccgtcccccttaccatgccccattcttttaggcttgggggaccgaactaactccccccgcccccacttgcaaagttcagcctccgctttagaagctgacctctcagtttcacttggatgggtttcttcttag

SEQ ID NO: 158839 - DNA, 365 bp, Homo sapiens
aaataatgaaagatcgatggatgaatgttggtcatgaagaggaagaactaaagccatatactgagcctgatccggatttcaatgacacaaaaagaatagacattatggtcaccatgggctttgcacgagatgaaataaatgatgccttaataaatcaaaagtatgatgaagttatggctacttatattcttctaggtagaaaaccacctgaatttgaaggtggtgaatcgttatccagtggaaacttgtgtcagaggtcccggcccagtagtgacttaaacaacagcactcttcagtcccctgctcacctgaaggtccagagaagtatctcagcaaatcagaagcagcggcgtttcagtgatcat

SEQ ID NO: 158840 - DNA, 243 bp, Homo sapiens
ggaattctcggatgccctcgggtacctgcagctgctgaacagctgttctgatgctgcgggggctcctgcctacagcttctccatcagttccagcatggccaccaccaccggcgtagacccggtggccaagtggtgggcctctctgacagctgtggtgatccactggctgcggcgggatgaggaggcggctgagcggctgtgcccgctggtggagcacctgccccgggtgctgcaggagtctga

SEQ ID NO: 158841 - DNA, 392 bp, Homo sapiens
cccacgcgtccgcccacgcgtccgcccacgcgtccgtggacgcgtgggctgttctgatgctgcgggggctcctgcctacagcttctccatcagttccagcatggccaccaccaccggtgagtccccggcccctgtcctggctcccttctcagctcccccgtgcagcgtgactgagggttcaggggaccctccctcttctgcaggcgtagacccggtggccaagtggtgggcctctctgacagctgtggtgatccactggctgcggcgggatgaggaggcggctgagcggctgtgcccgctggtggagcacctgccccgggtgctgcaggagtctgagtgagtgcacggcaggttcctcctgcctggtcccgggctcagccttcctcatcccc

SEQ ID NO: 158842 - DNA, 793 bp, Homo sapiens
cagagcctttgccaccatgggggagaccgtaatgagcgtcaaaattatccgaaaccgcctcactgggatcccagctggctactgctttgtagaatttgcagatttggccacagctgagaagtgtttgcataaaattaatgggaaaccccttccaggagccacacctgtaaggacatttagataatgatgatgttgccattattattgtcattgcttactaccatctattgaatccctactgtatacttattttatttaatcctaaaacaaccctttacagtaggcattgttatctttgtaggcccaggaaactgaagctcagggaattgaaataacttgtccaaggcaacacaggtagtaaatggcagagccaggattcagactgaagattggttgcctcccaaatccatgcctttccattctgcattgctgcctcccataaccgaagacttgaaactctagacctcttgcctgattgggaaactagaataggctggcagcagcaaggacacatttcaagagagttgcattctgctcttcccacagttacttagcttacagctgcaccagctggcacacctgggctcatagaaccatggagcttggcagtgcccttagccggtcatccgtgcaaccccctcattttatacaggagaaaaagctgaggcttagagagggggagatgttttggccaaggcgaaacgttttaaactgaactatgccacttacgggaaacaaccagataacagccctgagtattccctctttgtgggggacctgaccccggacgtgg

SEQ ID NO: 158843 - DNA, 381 bp, Homo sapiens
atgccggaccctatgtgaggggcctcagagatttgaagaatatgagtatttagggtataaggctggtctgtatgaagctattgcagatcactacatgcaggtgcttgtttgtcagcatgaatgtgtgagggaacttgccacccgccctggccgcctctctcccatcgagaattttcttcctctgcactatgattacctacagtttgcctactatcgagttggtgagtatgtgaaagccctggagtgtgccaaagcctatcttctatgccatccagatgatgaggatgtcctagacaatgtggattactatgagagtctgctggatgatagcattgacccggcatccattgaggccagagaggatttaacaatgtttgtgaa

SEQ ID NO: 158844 - DNA, 653 bp, Homo sapiens
  misc_feature (1)...(653): n = a,t,c or g
cactttgtacaagaaagctgggtacgcgtaagcttgggcccctcgagggatactctagagcggccgcccttttttttttttttttttttcagcaactggggcatgtttatttcctcctgggcctggcaggctgggagcagaatatagacaaaggcactggggcacctgggtctggcacggtctggagcttggccgcctgggtagcaaccgtgaagggtgtgccagggcgtgcagggactggagtcatcctcccagaactgagagagggccctcggggcatggaggcatcacaagtgctaggcttggcacaggtacaggggagaggttacggagtgggtgtgtgcagggcctggtgggaatggggagacccgtggacagagcttgttagagtgtcctagagccagggggaactccaggcagggcaaattgggccctggatgttgagaagctgggtaacaagtactgagagaacaaaagcttgtgggtcagcaggccccacaaagatgtgactgcagacaggatcggccctgggagagaccgaggctccaggtgactcctatagcaaggcagtgaggnggcgggtctggngctccagttcaggaatacatagtcagctgcagccactcctggatttcacctggatttgtcagtgc

SEQ ID NO: 158845 - DNA, 1736 bp, Homo sapiens
cactttgtacaagaaagctgggtacgcgtaagcttgggcccctcgagggatactctagagcggccgcctactacagcggagactacgagcgagcggtgcgcgacttggaagcggcgctgcgcagccaccggcgcctgcgggaaatccgcacgcgctgtgcccgccactgcgcggcgcgccacccgctcccgcccccgccccccggcgagggccccggcgctgagctgccccttttccgctccttgttggggcgggcgcgctgttatcgcagctgtgagacccagcgcctcgggggccccgcatcccgccaccgcgtcagcgaggatgtgcgcagcgacttccagcgcagagtgccctacaactacctgcagcgggcctacatcaagcttaaccagctcgaaaaagcagtggaggcagctcacacatttttcgtggctaaccctgagcacatggaaatgcagcagaacattgagaattacagggcgacagctggtgttgaagcattgcagttggtagacagagaagccaagccacacatggagagttacaatgcaggagttaaacattatgaggctgatgactttgagatggctatcaggcacttcgaacaagccttaagagaatatttcgttgaagatacagaatgccggaccctatgtgaggggcctcagagatttgaagaatatgagtatttagggtataaggctggtctgtatgaagctattgcagatcactacatgcaggtgcttgtttgtcagcatgaatgtgtgagggaacttgccacccgccctggccgcctctctcccatcgagaattttcttcctctgcactatgattacctacagtttgcctactatcgaggaagtgggaactttaaggagccaaacaaagactgtttctatgttgatgccttgttgccagaaaacagaaatcagatcctcacccagatcctccaatcagcaaatctgagtgccaacaagctcttcacagtgggaggacaaatagcaatctacctttgcaaagctcaagaacttttagttggtgagtatgtgaaagccctggagtgtgccaaagcctatcttctatgccatccagatgatgaggatgtcctagacaatgtggattactatgagagtctgctggatgatagcattgacccggcatccattgaggccagagaggatttaacaatgtttgtgaaacgtcataagctggagtctgagctgataaaatcagctgcagaaggtctggggttttcatacactgaaccgccatttaaagacaaagtcacctcagcccgtgctttcctgtcaccaatgcgaaatgtagccagtagcacagtcgtagaatcacatcacactcaatttcgtgctcttgaggtcaaggcccagcagaatgaaaggaactggcaggccagtgagttacctagaggaaacaatgttgaaggacagaaagaaaatggcctgtttggcagctctgctcatgcccaacataaaacactgctgatttatggccctcaagggatgccacccacattggtgaagatgatcttctttactcagtctactgattccaatgctaatctcttccagaaacatcctcacagacacaatcagaaatgtttttctagctatctgggcccattcaagtcgacatctaaaattgactgtcacacagatgaaaaaacagaaattcaaatatttgaaacaaattacctaaggccacgcggagattaa

SEQ ID NO: 158846 - DNA, 441 bp, Homo sapiens
cctgacctcctctgtggacctgtactttggggcgcaccatcccctccatgtgacaatgttgcccaatccctcgcacctggaggccgtcaaccccgtggccgtgggcaaaactcgcggcaggcagcagtctcgccaagacggcgattactctccagacaactcagcccagccgggggacagggtcatttgcttacaggtccatggtgatgcttctttctgtggtcaagggattgttcctgaaacattcacgctgtccaatctcccacatttcaaaattggtgggagtgtgcatttgattgttaataaccagctgggttacaccactccagctgaaagaggaaggtcttctttatactgcagtgatattgggaagcttgtgggctgtgccatcatccatgtcaatggagacagcccagaggaagtggtccgtgccacacgact

SEQ ID NO: 158847 - DNA, 569 bp, Homo sapiens
ggtgtctgcaaggttaggaatgttgagaaaagcacactttctaacattaaaaagacagagaacttaagattgtatactgtagaattcggggacatagacatgcaagtttttgtttcattctttgtgcaaatgcctttgcctttttaaagaaaaaacatcacactatttgcacagactgggagttctgggaaacagatgaatggggagaagtgaggcacagggacgtcctgcctgagtatgcgggcctggcctgtcctcctgtctgagggtgacactggacactgagccacacacgatccgtggggactgaaggctcggccccccgacccgctctggggggtggcagtagatcgggacgcttctcactccaggctctttcccggtccctggggctctcagaggagtagctgactgtctctttctgctgctgctgctgctggcaggtatgggggcaccttccagaacgtgtctttgcagctgcccatcactctcaacaaattcttccagccgacagaaatggcttctcaggatttctttcaacgttggaagcagttgagcaatccacagcg

SEQ ID NO: 158848 - DNA, 3120 bp, Homo sapiens
gcggggcctggcggtcttcatctcggatatccgcaactgtaaaagtaaagaagcagaaataaaaaggataaacaaggaactggcaaatatcagatcaaaatttaaaggtgacaaggctcttgatggctatagtaaaaaaaagtacgtctgcaagttgctcttcatctttctccttggtcatgacattgactttggacacatggaggctgtgaacctgctgagttcaaacagatacacggaaaagcagatcggctaccttttcatctctgtgttggtgaactcaaacagtgagctgatccgcctgatcaacaacgccatcaagaatgacctggccagccgcaaccccaccttcatgggcctggccctgcactgcatcgccagcgtgggcagccgggagatggccgaggccttcgccggggagatccctaaggtcctcgtagccggagacactatggacagcgtgaagcagagcgcggccctgtgcttgctgcgcctgtacaggacgtcccccgatcttgtccccatgggcgactggacatcccgagtggtgcacctgctcaatgaccagcacttgggtgtggtaactgcagccacaagtctgatcaccactttagcacagaagaacccagaagagtttaaaacctccgtgtctctggctgtctctaggctaagcagaatcgtgacgtctgcatccacagatctccaggattacacttactattttgtcccggctccctggctgtctgtcaaactgctgagactgctgcagtgctacccacccccagaccctgcagtgcgaggccgcctgactgagtgcctggagaccatcctgaacaaagcccaagaaccgcccaagtcgaagaaggtccagcactccaacgcgaagaatgccgtgcttttcgaggccatcagcttaatcattcaccatgacagtgagccgaacctgctcgtccgtgcctgcaaccagttgggccagtttctgcagcaccgcgagaccaacctgcgctacctggccctggagagcatgtgcacgctggccagctctgagttctcccatgaggctgtcaagacgcacatcgagacggtcatcaacgccctgaagactgagcgggacgtgagcgtgcggcagcgggccgtggacctcctctacgccatgtgcgaccgcagcaacgccccacagatcgtggccgagatgctgagctatctggagacagctgactactccatccgagaagagattgtgctgaaggtcgccatcctggctgagaagtacgcggtggactacacctggtatgtggataccatcttgaacttgatccgaattgctggtgattacgtgagtgaagaggtgtggtaccgagtcattcagatcgtcatcaaccgggacgacgtgcagggctacgcggccaagactgtgttcgaggctcttcaggctcccgcgtgccacgagaacctggtcaaagtgggcggctacatcctgggggagtttggaaacttgatagctggagacccgagatccagcccgctgatccagttccacctgctgcactccaagttccacctgtgcagcgtccccacccgcgcgctgctcctgtccacctacatcaagttcgtgaacctcttcccggaggtgaagcccaccatccaggacgtgctgcgcagcgacagccagctcaggaacgcagacgtggagctgcagcagcgtgctgtggagtacctgcggctcagcaccgtggccagcaccgacattctggcgaccgtgctggaggagatgcccccattcccggagcgggagtcctccatcttggcaaagctcaagaagaagaagggccccagcacggtgacagacctggaggacaccaagcgggacaggagtgtggacgtgaacgggggtcctgagcctgccccagccagtaccagcgccgtgtctacgccttctccgtcggcagacctgctgggtctcggggctgccccccctgcccccgcgggccccccaccctcctccggcggcagcgggctgctcgtggacgtgttctcagactcggcctctgtggtcgcgcctctcgctcctggctccgaagacaactttgccaggtttgtttgtaaaaacaatggtgtgttgtttgaaaaccagctgcttcaaattggacttaagtctgaatttcggcagaatttaggtcggatgtttatcttttatggtaataagacctccacgcagttcctaaactttaccccaacactaatctgttcagacgaccttcagcctaacctgaacctgcagaccaagcccgtggacccgaccgtggaggggggcgcgcaggtgcagcaggtggtcaacatagagtgcgtgtccgacttcacggaggcgccagtcctcaacattcaagttcacggtagtgggggcaccgttccagaaccgtgtctttgcagctgcccatcactcttcaacaaattcttccagccagacagaaatggcttctcaggatttcttttcaacgttgggaaggcagtttgaggcaatccacagcagggaagttgcaggaacatcttttcaaaggcaaagcacccaatggacacagaagtcaccaaagccaagatcattggatttggttctgcacttcttgaagaagttgatcctaatcctgcgaatttcgtgggagctggaatcatccacacgaaaaccacccagattggatgcctcgtgcgcttggagccgaacctgcaagcccagatgtaccgagctcacgctgcgcacaagtaaggaagccgtttctccagaagattatgtgaattgctctcagcgcagttttagttcctgaaggatggaagaccaggctcgtgtgtcttgtgttggtcttcggtctgtgccgtttgtccttcgtgggccatcctgcagaatgagcaccgtgtccagtgccacagcacaaggcgcctccccgccccaccgccccacacctctcccctttgggctggacgggaacacacgtgtgtggctcaggaggaaaagctcagcctggactgtggcagccacggcagaaggtggatcttgggatcaatttttataaaaatcgagacagttctgtggttaaatctacaaattaaagggaaattagaagttgg

SEQ ID NO: 158849 - DNA, 397 bp, Homo sapiens
aagcaagaagaggaagaggcaggaagagaagcatgtgtgtaagaagcataatcaggttttgactttcttctgtcagaaagacctagagcttttatgtccaaggtgcagtttgtccactgatcaccaccatcactgtgtttggcccataaagaaggctgcctcctatcataggaaaaaactggaggaatacaatgcaccgcggaaggagagagtggaactaactgaaaaagtcataactatgcaaaccaggaaatcactggaactgaagaaaaaggtaaaacatagggcagaagaagtcaagcctgaatttgagcaacttaggttatttctccaaaatgagcaggagactgttcttaggcatttacaagatgaacagatggatattttaccacaactg

SEQ ID NO: 158850 - DNA, 438 bp, Homo sapiens
agatcgcgtcccgaaatgtcccggatctgactctaatagaccttcctggcatacccacaggggctgcgggcaatcagccggctgacattggggataacatcaagactctcatcaagaagctcatccagaggcacgagacaatccgcctggcggtggtccccaggattgtggacatcgccgccacagaggctctcaccatggcccaggaggtggaccccgagggagaccggaccatcgaaatcttgacgaaacctgatctggtggacaaaggaactgacaacaaagctgtggacgtggtgcggaacctcgtgctccacctgaagaaggcgcacatgattgtcaagtgccgtggccagcagggagatccagaccagatgagcctgcccgaaaccctgccgagagacaagatcttctttgagaaccacccatatatcaagg

SEQ ID NO: 158851 - DNA, 354 bp, Homo sapiens
acaacgatgagcaagccccagcacagtcactcttgacacctccacgcccagcagccatcatgcccctccgctctgtgccctcagcgtccccgtcacccccgtcggcctccagtaccgggctccacgcagccccacaggccttcccagtccccacaggtccccgtcctgataggtccctggagctccactggccctcaggtaaactccaagcgccacactactgtctacaaacgctggtgatctggacctgcagcccttctcgccttggtggaggcccctccccacgctctggaaagtgcctcaggccctctcagctatggtctatgcaccttccattcccctcacatagatcac

SEQ ID NO: 158852 - DNA, 339 bp, Homo sapiens
agttaaagctataccccaatgagacaatagtagggaatgggtcgccaagccaaacgaacaatggcgcaatgttgatatggattaaacgaaaaatccacttcgtgggtacaaaaagttatcctgcgtcagtttccaaagtagctgggaaaaaaggtacccggctccacgcccagagatttttagtacatttagaaaggacagggggcaaatgccattatacaatgataaaagggtcaattcatctggaatatacagcaattataattatatatgcaccaaacatcagaacacccaaatatataaagcaaacattgacaaaactgaagggagaaataaaat

SEQ ID NO: 158853 - DNA, 338 bp, Homo sapiens
ctccttcgggtgtacagcttcatggccctcaaaatgtaccatcagctccccacccaggtgtcaagttccacggccctcaacttgcaacatcaactccccaccgggtctccagatgcacggccctcaaaatggaacatcaactccccacccaggtttccagctccacggccctcaacctgcaacatcagctccccaccgggtctccagatgcacagccctcaaactggaacatcaactccccgtcgtgtctccagatgcacggcctgcaaactggaacatcagctcccgtcaggtctccagctgcacagccctcaaactgcaaccgcggccgcgtcgac

SEQ ID NO: 158854 - DNA, 70 bp, Homo sapiens
ggcaactatggcggtggtcctggttatagtagtagagggggctatggtggtggtggagtcgacgcggccg

SEQ ID NO: 158855 - DNA, 374 bp, Homo sapiens
  misc_feature (1)...(374): n = a,t,c or g
cggacgcgtgggctagttcggatcgcgagcggccacccnnnnnnnnnnnnnnnnnnnnnngggaagggggggattttttttgggcccccgggggccaaaaaagaaaaccccggggggggagggatttacccgattttttgacccggggtggggaaaaggccccgaaaaaaaaaccccacccccctggggggggaaagggggccccaaaaaaatgaacctttggggtgccggaaaaataaaatttttagaaataaaggggaaaagtttccctcgggggaccacccccaatttttttggcccccccctttttttttcccccccaaaaacccagggcccggggaattttttggatttttcttttaaactaaaaaaca

SEQ ID NO: 158856 - DNA, 374 bp, Homo sapiens
tccgcgttgccagcaacctgttttcttcgctgagaaggtgagctccctgggcaagaactggcaccgcttctgcctgaaatgtgagcgctgccacagcatcctgtcccctggcgggcatgcagagcacaatgggaggccatactgccacaagccatgctatggggctctctttggacccaggggggtgaacattggtggtgtaggctcctacttgtacaatccccccactcccagccctggctgcaccactcctctcagccccagcagcttcagccctcccaggccaaggactggcctcccccaaggcaagaaaagccctccccatatgaagacattcactggggagacctcgctgtgccctggctgtggggagc

SEQ ID NO: 158857 - DNA, 459 bp, Homo sapiens
tccgggtcgacccacccgtccgacgtccccctccaatacacctgccagcatctccccaaaactgaatgtggaggtcaagaaggaagtcgacaaggagaaagcggtcactgacgagaaacctaagcaaaaagacaagcctggcgaagaagaggagaagtgtgacatctcttccaaataccattacttgactgaaaatgacttagaagagagtcccaagggggggcttgatatcctcaaatccttggaaaacacagtgacatccgcaatcaacaaggcccagaacggcactcctagctgggggggctatcccagcatccatgccgcctaccaacttcccaacatgatgaagttgtccctgggctcgtcggggaagagcacgcccctgaaacccatgtttggcaacagtgagattgtctccccgacgaaaaaccagaccctggtctctccacccagcagccg

SEQ ID NO: 158858 - DNA, 342 bp, Homo sapiens
agactcacagtcttgctgccccttctcctcttcaaagtttgtttccgaagtaccaccccttgcacctcacatcccagccaactctgcctacctgtcagccccagccctcctcaggcctgcctcagcctcacagccaggatcctaccaacaccaacaccgcgccaaataacccctcccaaaagcctcaccggaactaatctggggactctgcctattattaggaacaccttggatgaagcccctacccgcagaattctggcagtagcagcagaattttcaggcatgtgcctaattttgttggggtggtggttgattattttttttaaatctaggatttctggg

SEQ ID NO: 158859 - DNA, 743 bp, Homo sapiens
  misc_feature (1)...(743): n = a,t,c or g
ttttttttttngcaagggttttgccgccagaacacaggtgttgtgaaaactacccttaaaagccaaaatgggaaaggaaaagantcatatcaacattgtcgtcattggacacgtagattcgggcaagtccaccaatactggccatatgagctataaatgcggtggcatcgactaaagaaccattgaaaaatttgagaaggacgctgctgagatgggaaagggctccttcaagtatgcctgggtcttggataaactgaaagctgaccgtgaacgtggcatcaccattgatatctccttggggaaatttgagaccagcaagtactatgtgactatcattgatgccccaggacacagagactttatcaaaaacatgattacagggacatctcaggctgactgtgctgtcctgattgttgctgctggtgttggtgaatttgaagctggcatctccaagaatgggcagacccgagagcatgcccttctggcttacacactgggggtgaaacaactaattggcggcgttaccaaaatggattccactgagccacccttcaggcgcaagagatatgaggaaattgttaagggaagtcaggcaccttacattaagaaaaattgggttacaacccccgacacaaggagcttttgggcccaatttctggctgggaatggtggaccaacatggctgggaacccaagtgcttaacaatgcccttgggtttcagggggaagggcaaaggccacccc

SEQ ID NO: 158860 - DNA, 1389 bp, Homo sapiens; identical to SEQ ID NO: 125531

SEQ ID NO: 158861 - DNA, 1868 bp, Homo sapiens
  misc_feature (1)...(1868): n = a,t,c or g
gagaagccgctgattacgccaaggttggcacgaggggtttgccgccagaacacaggatgacgtgaaaacttacccccttaaagccaaaatgggaaagtgttaagactcatatcaacctttgccgtcattggacacagtagattcgggcaagtcccaccactactggccatctgatctataaatgcggtggcatcgacacaaagaaccatttgaaaaatttgacgaaggaggctgctgagatgggaaacgggctcctttcaagtatgcctgggtcttggataaactgaaagctgagcgtgaacgtggtatcaccattgatatctccttgtggaaatttgagaccagcaagtactatgtgactatcattgatgccccagggacacagagactttatcaaaaacattgattacagggacatctcaggcttgacntggtttggggggccccctttttgggggggttntcccctgattgttgctgctgggtgttggtgaatttgaagctggtatctccaagaatgggcagaacccgagagcatgcccttctggcttacaccactgggtgtgaaacaactaaattgtcgggtgttaacaaaaatgggattccactggagcccacccctacagcccagaagaagatattgaaggaaattgttaagggaaagtcagcactttccattaaagaaaatttggctacaacccccgacacagtagcattttgtgcccaatttcttggtttggaattggtgacaacatgcttggagcccaagtgcctaacatgccttggtttcaaggggatggaaaagtcacccgtaaggattggcaatgccagtggaaccacgctgctttggagggctctggactgtatcctacccaccaactcgtccaactgaccaagcccctttgcgccctgccttttcaaggatgtcttaccaaaaattggtgggtatttgggtacctggttccttgtttggcccgagtgggagactggtgttcttcaaacccgggtatgggggtcaccttttgctccagtcaacgttacaacgggaagtaaaatctgtcgaaatgcaccatgaagctttgagtgaagctccttcctggggacaatgtgggcttcaatgtcaagaatgtgtctgtcaaggatgttcgtcgtggcaacgttgctggtgacagcaaaaatgacccaccaatggaagcagctggcttcactgctcaggtgattatcctgaaccatccaggccaaataagcgccggctatgcccctgtattggattgccacacggctcacattgcatgcaagtttgctgagctgaaggaaaagattgatcgccgttctggtaaaaagctggaagatggccctaaattcttgaagtctggtgatgctgccattgttgatatggttcctggcaagcccatgtgtgttgagagcttctcagactatccacctttgggtcgctttgctgttcgtgatatgagacagacagttgcggtgggtgtcatcaaagcagtggacaagaaggctgctggagctggcaaggtcaccaagtctgcccagaaagctcagaaggctaaatgaatattatccctaatacctgccacccaactcttaatcagtggtggaagaacggtctcagaactgtttgtttcaattggccatttaagtttagtagtaaaagactggttaatgataacaatgcatcgtaaaacctttcagaaggaaaggagaatgttttgtggaccactttggttttcttttttgcgtgtggcagttttaagttattagtttttaaaatcagtactttttaatggaaacaacttgacccccaaatttgtcacagaattttgggacccattaaaaggttaactggg

SEQ ID NO: 158862 - DNA, 447 bp, Homo sapiens
agccatccagccccggctagtggcggtcagcaaaaccaaacctgcagacatggtgatcgaggcctatggacatgggcagcgcacttttggcgagaactacgttcaggaactgctagaaaaagcatcaaatcccaaaattctgtctttgtgtcctgagatcaaatggcacttcattggccacctacagaaacaaaatgtcaacaaattgatgggaaagtctgagttcttaataaaaagagaaaacatcatgccaagaacagaatgaattcaccattttctgggttatatatacttggaaacctacccaacctcatgtttattattatttggtggtctttcagaaaaattataaagaattgtagcccataaatttttttaactagcaaaagagacatttctgttctttttcctttaaataaaaggctacagtaaataaaatacaataca

SEQ ID NO: 158863 - DNA, 631 bp, Homo sapiens
gcggcacgcgggatctcccagccatccagccccggctagtggcggtcagcaaaaccaaacctgcagacatggtgatcgaggcctatggacatgggcagcgcacttttggcgagaactacgttcaggaactgctagaaaaagcatcaaatcccaaaattctgtctttgtgtcctgagatcaaatggcacttcattggccacctacagaaacaaaatgtcaacaaattgatgggtaagataaaattaaatatgaaaacaaaattgttctgtcattgtattgcttctactaccctttgtggaagagagagcaacttttagaatagccccaattcaccatttgtttttggaatttctttaggaaagtctgagttcttaataaaaagagaaaacatcatgccaagaacagaatgaattcaccattttctgggttatatatacttggaaacctacccaacctcatgtttattattatttggtggtctttcagaaaaattataaagaattgtagcccataaatttttttaactagcaaaagagacatttctgttctttttcctttaaataaaaggctacagtaaataaaatacaatacagtaaagtaagtatagtaaagtaaaattaagaattatagt

SEQ ID NO: 158864 - DNA, 898 bp, Homo sapiens
cgtcggtccccgggggatgtggagagctggcagcatgtcggccgagctgggagtcgggtgcgcattgcgggcggtgaacgagcgcgtgcagcaagctgtggcgcggcggccgctggcgatctcccagccatccagccccggctagtcggcggtcagcaaaacgcaaacctgcagacatgggtgatcgaggcctatggacatgggcagcgcacttttggcgagaactacgttcaggaactgcgtagaaaaagcatcaaaatcccaaaattctgtctttgtgtcctgagatcaaatggcacttcattcggccacctacagaaacaaaatgtcaacaaattgatggctgtccccaatctcttcatgctgggaaacagtgggattctgtgaagttgggcagacaaagtgaacagttcctgggcagaggaaaaggttctcctgaaaggttaaaggttatgggtccaggatttaacaccagccgagaagagatatacctgttttctgtttctcttcttgaaggtaaacatgggccttccaccttcagagaccatagccatcgtggagcacataaacgccaagtgttcctaacctgggagtttgtggggttgattgaccttagggaagctttgggcatgatcttagtcaaggaccaaatccagacttccagctgttattgtcgctcccggaagagactgtggtaaaaagctgaagaatccctgctgaccaggttgagctgagcatgggcctgtccgcagatatgcagcatgcggttgaagtaagatctacagatgtctggataagaagcacggtatttggagaaccggattactcaaagaaacccaccccggacaagtgcgcagcagacgtgaaggccccgctggaggtggcacaggagcactga

SEQ ID NO: 158865 - DNA, 349 bp, Homo sapiens
ggtcgacttttttttttttttttttttttgggttcttaccactttattgacgggaatggggtggcaaagcagcaaggacgatgacatccgacgtcctcggctgggagctacaagaacgagagtgatagatcagcgggtgtgcgcgcgcccgcccgccagccccctcccagctccgctcgggcaggctcagactccagttagcatcgcccgcgtcagcagtctaacacgtgctttaattggaaatgtcatcacagcaggccggcccccctacgcctccctgctcccgagccacgacctccggggcccacccagccagacgacccgccaggaatacaacctgacctcccgg

SEQ ID NO: 158866 - DNA, 129 bp, Homo sapiens
gatctaagttgtcattctcatggagaggcaacacaaaagcattctgaaaaatgtaaggcttcctgtacacacatgttcataacagctttattcctaattgccaaacactggaatcagcccacatgtctc

SEQ ID NO: 158867 - DNA, 387 bp, Homo sapiens
agccccagacagtggctgcgaccacagtgcccaccaatacctcatgggcacccaccaccacctccctggggcctgcaaaggacaagccaggccttcgcaaagcagcccaggggggtggttctaccttcaccagccaaggagggacaccagatgccacagcagcctcaggggcccctgtgagtccacaagctgccccagagccttctaagcgcccccaccacggagacccacaggatggccccagccatagagactcttggcttactgttacccctggcaccagcagacctctgtctaccagctctggggtcttcacggctgccacggggcccaccccagctgccttcgataccagtgtctcacccccttccaggggattcctcagga

SEQ ID NO: 158868 - DNA, 693 bp, Homo sapiens
ggattcggcaggagaagcagcttggggtacacaggaccatcccaagtcctgggccagcttcttcccttttccttccttatcctggtggtgtagcctggaaatggaaatttaagtcatttctaaactgtcatttgctcctcatttctgagaagggtttggcgttggacgtatttgagaagagatatcaagaggatgatgagattggaatggtttatagaccctgattgggcttcatggaccaaatgtacaattctggaatttattctacatccacaaaaatgtaaatatgtgcagaagaaggaaataaacttctaggaaagctctaagtctgagcatggcctgaagcaaacactaagaacatatgcttaacttctgacctctgccatgggccttgcttattcagttagaacgcccacctcccatttgatttctgtaccatgtctttcatgactgcaagacagctgcagtgttgcaggagactgctactctgccatggccccatgacaggcccagaacctctccccagtcactccctccacctcctttacagtgattcggaatgtccagtttaagatcctggatgcggtggttgcccaggagcccctgcaccggggcgcgggccagatcatccccacagccaggagagtcgtctactctgccttcctcatgggggcacgtgacttaggatgcaac

SEQ ID NO: 158869 - DNA, 3455 bp, Homo sapiens
ggcggaagcacgatctccggcagcggcctgggaactcttagctgagcaggcgagagcatcatggataccgacttatatgatgagtttgggaattatattggaccagagcttgattctgatgaagatgatgatgaattgggtagagagaccaaagatcttgatgagatggatgatgatgacgacgacgatgacgtaggagatcatgacgatgaccaccctgggatggaggtggtgctgcatgaggacaagaagtactacccaacagccgaggaggtgtatggtcctgaggtggagaccatagttcaagaggaagacactcagcctctcacagaacccattattaagccagtgaaaaccaagaaattcactctgatggagcagacattacctgttacggtgtatgagatggatttcttggcggatctgatggataactcagagctcatcagaaatgtgaccctttgtggacatctccaccatggcaagacatgttttgtggattgtttaattgaacagactcacccggaaatcagaaagcgctatgaccaagatctgtgctatactgacatcctcttcacagagcaagagagaggtgtaggcatcaaaagcactcctgtgacagtggtcttgccagacaccaaaggaaaatcttatctcttcaatatcatggacactccaggacatgtgaatttctctgatgaggtcacagctggcttgcgcatctcagatggagtggtccttttcattgatgctgctgagggggtgatgctgaacacagagcggctgatcaagcatgcggtgcaggagaggctggcagtcactgtgtgcatcaacaagattgaccggctgatcctggagctgaagctgcctccaactgatgcttattacaagctgcgccacattgtggatgaggtcaatggattaataagcatgtattccactgatgagaacctgatcctttccccactcctgggtaacgtctgcttctccagctcccagtacagcatctgcttcacgctgggctcctttgccaagatctatgccgacacctttggtgacattaattaccaagaatttgctaaaagactctggggtgacatctacttcaaccctaagacgcgaaagttcaccaaaaaggccccaactagcagctcccagagaagtttcgtggagtttatcttggagcctctttataagatcctcgcccaggttgtaggtgacgtggacaccagcctcccacggaccctagacgagcttggcatccacctgacgaaggaggagctgaagctgaacatccgccccttgctcaggctggtctgcaaaaagttctttggcgagttcacaggctttgtggacatgtgtgtgcagcatatcccttctccaaaggtgggcgccaagcccaagattgagcacacctacaccggtggtgtggactccgacctcggcgaggctatgagtgactgtgaccctgatggccccctgatgtgccacactactaagatgtacagcacagatgatggagtccagtttcacgcctttggccgggtgctgagtggcaccattcatgctgggcagcctgtgaaggtactgggggagaactacaccctggaggatgaggaagactcccagatatgcaccgtgggccgcctttggatctctgtggccaggtaccacatcgaggtgaaccgtgttcctgctggcaactgggttctgattgaaggtgttgatcaaccaattgtgaagacagcaaccataaccgaaccccgaggcaatgaggaggctcagattttccgacccttgaagttcaataccacatctgttatcaagattgctgtggagccagtcaacccctcagagctgcccaagatgcttgatggcctgcgcaaggtcaacaagagctatccatccctcaccaccaaggtggaggagtctggcgagcatgtgatcctgggcactggggagctctacctggactgtgtgatgcatgatttgcggaagatgtactcagagatagacatcaaggtggctgacccagttgtcacgttttgtgagacggtggtggaaacatcctccctcaagtgctttgctgaaacgcctaataagaagaacaagatcaccatgattgctgagcctcttgagaagggcctggcagaggacatagagaatgaggtggtccagattacgtggaacaggaagaagctgggagagttcttccagaccaagtacgattgggatctgctggctgcccgttccatctgggcttttggccctgatgcgactggccccaacattctggtggatgatactctgccctctgaggtggacaaggctcttcttggttcagtgaaggacagcatcgttcaaggtttccagtggggaaccagggagggccccctctgtgatgaattgattcggaatgtcaagtttaagatcctggatgcggtggttgcccaggagcccctgcaccggggcgggggccagatcatccccacagccaggagagtcgtctactctgccttcctcatggctactcctcgtctgatggagccttactactttgtagaggtccaggcccctgcagattgcgtctctgcagtttataccgtcctggccaggcgcaggggggcacgtgactcaaggatgcacccatcccaaggcttcccctctgtagaccatcaaagcttttaatcccggccatcgactcttttggctttgagactgatctccggactcacacccagggacaagccttttctctgtctgtcttccaccactggcagattgtgcctggtgatcccctggacaagagcattgtcatccgccccttggagccacagccagctcctcacctggcccgggaattcatgatcaaaacccgccgtaggaagggcctcagtgaagatgtgagcatcagcaaattcttcgatgatcctatgttgctggaacttgccaaacaggatgttgtgctcaattaccccatgtcccaacagctgcttcaagcatctgaccacacaacctggggaaaccacttatctgacagttcacgaaacactttcacatgtattgtgtatctgagaaacctcacagcagcctgcaagatggatgatgatgacgacgacgatgacgtaggagatcatgacgatgaccaccctgggatcgcccttgccgcgtataggagtcccaggcctttagttgtagcgtgcagaagagcccaattcttcctcactcgcgagcaggaggacctttcacggggccgacgtacagagggccaggccccggtggcagatgtgcaggcccagtctaggtccagcatagatgagcggaggggtcctgaccacccgtacgggtgtgaccatcccaagatgaacttaaaggacagccttgatgtggcaaagccggcggacgccaagaatggcaattccatccgcttggctttgacagtgtcagaagcatga

SEQ ID NO: 158870 - DNA, 639 bp, Homo sapiens
agcagttgttgtgatctgttctgacgcatcggatatggagctgatgcttgtgggtggatttttcaggtgtgctggaaaagttgaggtgaatgtccagggtgccgtgggaattctgtgtgctaatggctgtggaatgaacattgctgaagttgtttgcaggcaacttgaatgtgcgtctgcagtcacggtctccagagagcctcatttcacagaaagaacattacacatcttaatgtcgaattctggctgcactggaggggaagcctctctctgggattgtatacgatgggagtggaaacagactgcgtgtcatttaaatatggaagcaagtttgatctgctcagcccacaggcagcccaggctggttggagctgatatgccctgctctggacgtgttgaagtgaaacatgcatacacatggcgctctgtctgtgattctgatttctctcttcatgctgccaatgtgctgtgcagagaattaaactgtggagatgccatatctctttctgtgggagatcactttggaaaagggaatggtctaacttgggccgaaaagttccagtgtgaagggagtgaaactcaccttgcattatgccccattgttcaacatccggaagacacttgtatccacagcagaaa

SEQ ID NO: 158871 - DNA, 439 bp, Homo sapiens
  misc_feature (1)...(439): n = a,t,c or g
aaggagggagtcccgagctcctggcacagtggctgagacctacttgttgggcagattaggtggaatgtccccttttctgcagctgggaggagacctcagagagtgggacggggtctttcttgcggggacctgtggccacggagcgggagggaggcgagtgcagtttccctcctgccctctcctcatgccttccgggtgcctcttcacgccctccctttccatcccttcctcctcctcccgcgctctctttccactcccctccccctactccatccgatcaggtccttcctatagctgtgccgccccccaccccttacctagccagagttgatcttgacctctaggatggtgagggggcctgaggcctggaggccgccgttgctgcggacgcgtgggtcgatccgggnagtccgttcggangcntctcaattgttcaaan

SEQ ID NO: 158872 - DNA, 522 bp, Homo sapiens; identical to SEQ ID NO: 150073
  misc_feature (1)...(522): n = a,t,c or g

SEQ ID NO: 158873 - DNA, 1803 bp, Homo sapiens
  misc_feature (1)...(1803): n = a,t,c or g
acgggtttgccgccagaacacaggtgtcgtgaaaactacccctaaaagccaaaatgggaaaggaaaagactcatatcaacattgtcgtcattggacacgtagattcgggcaagtccaccactactggccatctgatctataaatgcggtggcatcgacaaaagaaccattgaaaaatttgagaaggaggctgctgagatgggaaagggctccttcaagtatgcctgggtcttggataaactgaaagctgagcgtgaacgtggtatcaccattgatatctccttgtggaaatttgagaccagcaagtactatgtgactatcattgatgccccaggacacagagactttatcaaaaacatgattacagggacatctcaggctgactgtgctgtcctgattgttgctgctggtgttggtgaatttgaagctggtatctccaagaatgggcagaccccgagagcatgcccttctggcttacacactgggtgtgaaacaactaattgtcggtgttaacaaaatggattccactgagccaccctacagccagaagagatatgaggaaattgttaaggaagtcagcacttacattaagaaaattggctacaaccccgacacagtagcatttgtgccaatttctggttggaatggtgacaacactgctggagcttttgttctaacatgccttggttcaagggaatgaaaagtcacccgtaaggatggcaatgccagatggaaccacgctgcttgaggctctggactgcatcctaccaccaactcgtccaactgacaagcccttgcgccatgcctctccaggatgtctacaaaattggtggtattggtactgttcctgttggccgagtggagactggtgttctcaaacccggtatggtggtcacctttgctccagtcaaccgttacaacggaagtaaaatctgtcgaaatgcaccatgaagctttgagtagaagctcttcctggggacaatgtgggcttcaatgtcaagaaatgtgtcgtgtcaaggatgttccgtcgtggcaacgttgctgggtgacagcaaaaatgacccaccaatggaagcagctggcttcacttgctcaggtgattatcctgaaccatccaagaccaaaaaaacgcccggcatatgccccttgaattggattgccacacggctcacattgcatgcaagtttgcctgagcctgaaggaaaagatttgatcgccgttctgggtaaaaagctgggaagatggcccctaaaattctttgaagtctgggtgatgctggccattggttgatatggttccctgggcaagccccatgtgtgtttgagaagcttctcaagactatccaacctttgggtcgcttttggccgttccgttatatgagacagacagntttgcggttgggtgtcaatcaaaagcagttggacaaaaaaggctgctgggagctggcaaggttcaccaaagtctggcccagaaagcttaaaaaggctttaatggaatttaatcctaatacctgccaccccactcttaatcaatgggtggaagaacggtctcaagaactgtttggtttcaattggccatttaagtttaagtagtaaaaagactgggttaatggataacaatgcatcgtaaaaccttcaagaaggaaaggagaatgttttgtggaccactttggttttcttttttgcgtgtggcagttttaagttattagtttttaaaatcagtactttttaatggaaacaacttgaccaaaaatttgtcacagaattttgagacccattaaaaaagttaaatgagaaaaaaaaaa

SEQ ID NO: 158874 - DNA, 442 bp, Homo sapiens
ggcaaacgcagctctctgtcagcatccgacgggctgtcagaccagtgctgatcttcactggactcttcctcctcctcgtcatagtcctcctcctcctcctcttcatattcttcctcctcctcgtcatagacctcctcctcctcctcttcatattattcctcctcctcctcctccttttcattcccaggcccaaagctctttgaggcctctagctcctcttcacttttccctttcagaagggcatggatccgcacggcctccttccacggaacaccacccaggtcagatgggggcaggcgaggctcctcctcctcctcctctccctcctcctccctctcagactcggaaatactgccggggacgtcctcctcggcgccagaatccagcaaactgctcaggttgtgctcggcctgagtctctcctgcctcccctcgacccggga

SEQ ID NO: 158875 - DNA, 413 bp, Homo sapiens
  misc_feature (1)...(413): n = a,t,c or g
acnnnnnnnnnnnnnnnnnnnnnnnnnnnnnnnnnnnnnnnnnnnnnnnnnnnnnnnnnnnnnnnnnnnnnnnngcttcggcttgtaaacatcagcaactcattcgaatatcaaaacacagggcaggacaaaatgcatgtcaggtcatacatagcctgtgaactcagcgtagacttccagtgggtgttagttaccccacatcagtgtcctgggatcgtaggggtgagtgaagaaacaagtgtgagtgccaagatgatgccaagggctgtgatttcctggtgggaagaaagaaggaatagaagccaaaggaagggggatgaaaagcacaaccacgaatcacaaggaatcaagttcggagagaattttggcagagattttgagaggggggctttaagtcagccatggacatactg

SEQ ID NO: 158876 - DNA, 954 bp, Homo sapiens
ttttaagcttttggatgatttttattgatttcatgccattattaaggttaataccctcagaatctccataggcagtagtagcccaacccaggccctgcagggcccagctcttggcgactttcacattccaagaaacttggtttagaaatcaaaggtaatttaaaagttatttgaatctttactgtcattgcttgaagaatattaaaaagaattcaacttgtaacctataatgggaggcttaaatcctccttggccccattcttcttcttttttccccccttttcttttttcccttcattcctcttgcttcagtatgtccatgggctgacttaaagcccccctctcaaaatctctgccaaaattctctccgaacttgattccttgtgattcttggttttgcttttcatcccccttcctttggcttctattccttctttcttcccaccaggaaatcacagcccttggcatcatcttggcactcacacttgtttcttcactcagcccttttctccttggtcactgattctgctccatgagcagtcagaaatggagctggcaagctcagcctctcagctggagacactggagtcagggccctgtcccctccctgcccgcaaaactactcttcaaaggcttccttccgggcaccgcgaagccagcgtgctcagcattcagggaggcagcggcgctcgccttcatccaggacaacaaaactgccatttccgaagagaaaggaaacggctcgcggtttctggggttcccaagcgcgcgcctgcgagggaggccgcgagccgagtcgccacgcccagaaccccgagcccgcccccgcgccacccagcccggccccgccgccccggctgcgcacgcgacgccccctccaggccccgctcctgcgccctatttggtcattcggggggcaagcggcgggaggggaaacgtgcgcggcccgaaggg

SEQ ID NO: 158877 - DNA, 206 bp, Homo sapiens
cggccgcgtcgaccacacccacccggggctgccacgccccctctgtccacacagccccgacccacacagcctatgtatatacaaggccttcgggagcgtccgctttcgcctccccacagcagagcactgtcagtgtcccggacagcaattcttcttccccaaatcatcagggagatggagcttcacagacctctggtgaacaaatt

SEQ ID NO: 158878 - DNA, 206 bp, Homo sapiens
cggccgcgtcgaccacacccacccggggctgccacgccccctctgtccacacagccccgacccacacagcctatgtgaataacaagcctgtgggggcgtcggccctcgcctccccccaggagagcactggcagagtatcagacagcaattcttcttccccaaatcatcagggagatggagcttcacagacctctggtgaacaaatt

SEQ ID NO: 158879 - DNA, 327 bp, Homo sapiens
gcacgaggaacgacgagaggcccgcggcagagtacgagcagccatgggagtggaagaaggagcagatcgtgcgggctctgtcagtccagtttgaaggagctgagcgaccttccttcagggaggagacagtgaggcagcaccaccggcagaagagctggacccagaagatcctgaagccagccctctcggaccacagtgagggagagaaagtggacccgggcctgcccctggagaagcagccctggtatcatggtgccatcagccgtgctgaggctgagagtcgactacagccctgcaaagaagctggttacctggttcgaaatagtg

SEQ ID NO: 158880 - DNA, 324 bp, Homo sapiens
  misc_feature (1)...(324): n = a,t,c or g
gctcgagnnnnnnnnnnnnnnnnnnnnnnnnnnnnnnnnnnnnnnnnnnnnnnntttccccctggacagcacaggctccgagctgaaacaaaatatactctcttttacaggtctcccgcctgccatgcaaaaagttatgtataagggactcccccccgaggataaaacattgagagaaataaaagtgaccagtggggccaagatcatggggggtggctcccccatcaatggtgttttatctgtacacacacccatatattctgcgcaccttgatgcaaaggccgaaaaaaacaagaaagagcctctctgcaggcaaaaacaaag

SEQ ID NO: 158881 - DNA, 259 bp, Homo sapiens
ttcttttcaccccgaaatacaacagcccataacagagacttcctcggaccccactaacagggcaaggaacaagaagactacaccgctcatcacaaaccctgcctgtatcgaaagtctattttaaaaactatgttccttgccgtagattgcagagctaatttatcacgtttctctcctgtgagacccccccttttatatgatatatccagaggaagttttgtaatataaaacaggacgcccacaaaaaaaaaaaaaaaaa

SEQ ID NO: 158882 - DNA, 502 bp, Homo sapiens
cacggtcactatttattctttgttcctttttctttttgtaagaaacattcacaaaaaccagtgcaaaaccatcagtgtgggcgtcctgttttatattacaaaacttcctctggatatatcatataaaagggggggtctcacaggagagaaacgtgataaattagctctgcaatctacggcaaggaacatagtttttaaaatagactttcaacatatggacccatgggggaaggaggagggggctttcgatacaggcagggtttgtgatgagcggtgtagtcttcttgttccttgccctgttagtggggtccgaggaagtctctgttatgggctgttgtattttcgggtgaaaagaaacaaaggagtttccctgtccacccctcccccacaaccccatccaccaccagaacctgctgtgggttgtatctggaccaagccagctaaaccctgtttctccctgtgctctggagggaggctcaagcctgatatgggctgaactttc

SEQ ID NO: 158883 - DNA, 921 bp, Homo sapiens
ctacaaatgtgccaaggaaccctcaatcagccctgattcagctcgccagccattcactgtccaccctcttaggctggaaagggaagacaggcagtttctgctcctgttggcattcgctcaggctggtagctatttgcaagactgcctgaggccattccttggaggcaaggcaaagaaagctcagcccaaatcaggcttgagcctccctccagagcacagggagaaacagggtttagctggcttggtccagatacaacccacagcaggttctggtggtggctggggttgtgggggaggggtgggcagggatacctctttgtttcttttcaccccggaaatacaacacgcccataaccagagacttcctcggacccccactaacagggcaagggaacaagaagactacaccgctcatcacaaaccctgcctgtaatcgaaaagccactttccctgctctgaaagctactgccctccttaagagaaagggaatagctctttattggactgggggtgagggccccctccccagggtccctgttaatttctggccttggtgctcaggcctgtccacaagcctcccttgtctatgtctctatccatgcttaaggggcccgggacaggatttcccaaaccaaccgaggccccagcacccgccgtctccccagaagcccccctcctccttcccccatgggtcatatgttgaaagtctattttaaaaactatgttccttgccgtagattgcagagctaatttatcacgtttctctcctgtgagacccccccttttatatgatatatccagaggaagttttgtaatataaaacaggacgcccacactgatggttttgcactggtttttgtgaatgtttcttacaaaaagaaaaaggaacaaagaataaatagtgaccgtgaaaaaaaaaaa

SEQ ID NO: 158884 - DNA, 667 bp, Homo sapiens
ggaggacggtccgtattgccggtcgacccacgcgtccgctctcattttcccatgacgcatggcaataccggattaagtgcaggtttggatgcatctgctcagactactttctcatgaactcaccattccaaacgatttgattggctgcataatcgggcgtcaaggcgccaaaatcaatgagatccgtcagatgtctggggcgcagatcaaaattgcgaacccagtggaaggatctactgataggcaggttaccatcactggatctgctgccagcattagcctggctcaatatctaatcaatgtcagtttagaaaacgctaaaccctcctcccaggcagcctccgtcacgatccctgatcacctcagcatcaacctctctcaaccctccaccccttcttcttctttctcctccaccaccaccccctcgctcgccacagcggggacctccgacgcaccctccagcctccccaacccctcttccgaccgccccttgtgtctccagtctgcttggcatgaaacccatccctttcctggctctcccccgccccgcttgttgctccccgctaccccccccctctagtttccacccaccacccccctttgtgccgcgcccttgtgtaccctacccaacacgtgaaggcgcgacaacaccataacatccctctcc

SEQ ID NO: 158885 - DNA, 1320 bp, Homo sapiens
aattatcactttggctggacccactaatgccatcttcaaagcctttgctatgatcattgacaaactggaagaggacataagcaagctctatgaccaatagcacagctgccagtagacccccggtcaccctgaggctggtggtccctgctagtcagttgtggttctctcattggaaaaggtggatgcaagatcaaggaatatacgagagagtataggggcttcaggtccaaggtggcaggggatatgctacccaacttaactgagcgggccaattactattgctggcattccaccaatccatcattgagtgtgtcaaacagatctgcgtggtcatgttggagactctctcccagtcccccccgaagggcgtgaccatcccggtaccggcccaaagccgtccagctctccggtcatcttgcaaggtggtcagccctataccattcaaggacagtatgccattccacagccagatttgaccaagctgcaccagttggcaatgcaacagtcatcattttcccatgacgcatggcaacaccggaattcaatggcatttgaatccagcttctccaagaggttcaaaggcctattggggcaggtttggaatgcatctgctcagactacttcttcatggaactcaccatttccaaacggttttgattgggctggcataatcggggcgttcaagggcgccaaaatccaatgagatccgtcagatggtctggggcgcagatcaaaattgcgaacccagtggaaaggatctacctgataggcaggttaccagtcacgtggatctgctgccagcattagccctggcgtcaatatcataatcaatgtcaggctttcctcggagaacgggtggcatggggagcagctagaaacaatgcagattcatccataaatccctttctgctgttcaccaccacccatgatccatctgtgtaagtttctgaacagtcagcgattccagggttttaattagtttgtaaattttcagtttctacacactttatcatccacttgtgaattttttaattaaagcgttttaattcctttctctgttcagctgttgaatgctgagatccatatttagttttataagcttctccctggtttttttttttttttggttttttttttttggctcatgaatttttctgtttgtcatggaaatgtaagagtggaatattaatacatttcagtttagttctgtaatgtcaggaatttttcaaaaaaattaaaagatggactggagctttttctttgtgaatagaaactggatgccccagtgattcatgtgggttttaaaaaaaaaaaaaaaaa

SEQ ID NO: 158886 - DNA, 376 bp, Homo sapiens
ggcacagttctggcctgggcggtgggggcgtgatgctggtacatgacatccgacgaaatgagagccacctaattgatttccgggagtccgcaccaggggccctcagggaagagaccctgcaaagatcctgggagaccaagcctgggctcttggtgggggttcccggaatggtgaaggggctacatgaagctcaccagctctatggcaggctgccatggtcccaagtcctggcctttgcagcagctgtggcccaagatggcttcaacgtgactcatgatctagcccgtgccctggctgaacagctgccacccaacatgtccgagcgcttccgggagacgttcctgccattcggcccgcccgccactacctggctcgt

SEQ ID NO: 158887 - DNA, 1968 bp, Homo sapiens
atggcggcggagaacgaggccagccaggagagcgccctgggcgcctactcgccagtggactacatgagcatcaccagcttcccgcggctgcccgaggacgagccggcgcccgcggccccgctgaggggccgcaaggacgaggacgcctttctgggagaccccgacaccgacccggactccttcctgaagtctgcacggctgcagcggctgccatcgtcgtcgtcggagatgggcagccaagacgggtcgccgctacgcgagacgcgcaaagacccgttctccgccgcagcggccgagtgctcctgccgccaggatgggctcacggtcatcgtcacggcctgtctcaccttcgctaccggtgtcaccgtggcgctggtcatgcagatctacttcggggacccccagatcttccagcagggtgccgtggtgaccgatgctgcccgctgcacttcactgggcatcgaggtgctcagtaaacagggatcttctgtggacgcagcggtggcagcagccttgtgtttgggtatcgtggctccacacagttctggcctgggcggtgggggcgtgatgctggtacatgacatccgacgaaatgagagccacctaattgatttccgggagtccgcaccaggggccctcagggaagagaccctgcaaagatcctgggagaccaaggtggggaccctggacctcctccaccccctgctctccggcccccccaggctgccatggtcccaagtcctggcctttgcagcagctgtggcccaagatggcttcaacgtgactcatgatctagcccgtgccctggctgaacagctgccacccaacatgtccgagcgcttccgggagacgttcctgccatcgggccgcccgccactacctggctcgttgctgcatcggcccgacctggctgaggtgctggatgtacttggcacctccggcccggctgccttctacgcaggtggcaacctcacactggagatggtggccgaggctcagcacgcagggggtgtcataaccgaagaggacttcagcaattacagcgcccttgtggagaagcctgtgtgtggcgtgtacagaggccacctggttcttagtcccccacctccgcacacgggccctgccctcatcagtgctctcaacatcctggagggcttcaatctcaccagcctggtatcccgagaacaggctcttcactgggtggcagagaccctgaagattgcattagccctggccagcagactgggagatcccgtctatgattctaccatcactgagagcatggatgacatgctcagcaaggtggaggccgcctacctccggggccatatcaatgactcccaggcagcccctgccccactcctgcctgtctatgaactagacggagctcccacggctgcccaggtgctgatcatgggacctgatgacttcattgtggccatggttagctccctgaaccagccctttggcagcggccttatcaccccctcggggatcctgctcaacagccagatgctggacttctcctggcccaaccggacagctaaccactctgcacccagcctggagaattcagtgcagccagggaagcggccactctctttcctgctgcccacagtggtccgacccgcggaggggctctgtggaacctacctcgctctgggggccaatggagctgcgcggggcctcagcggcctgacacaggttctgctgaatgtcctgaccttgaaccggaacctgagtgacagcctggcccgcggccgcctacacccggacctgcagtccaacctcctgcaggtggacagtgagttcacagaggaagagattgagttcctggaagccaggggtcaccacgtggagaaagtagatgtcttatcctgggtccatggcagccgaaggaccaacaacttcatcatcgctgttaaggaccctcggagcccagatgcagctggagccaccatcctgtag

SEQ ID NO: 158888 - DNA, 876 bp, Homo sapiens
tgagatggagtcttgctctgtcacctaggcacgatctcagctcactgcaacctccacctcccaggatcaagcagttctcctgcttcagtctcacaaatagctggggttacaggtgtgcactaccacgtatggctaaattttttccttttagtagagacatggttttgccatgttggccaggctgacaccccgtttctgccaaaaaaaaaaaaaaaaaaagcctggagtggcgtgtgcgcctttaagccccggctactcgggagggcttaggcgggagactcgcttgagcccgggaggcagatgttgctaggagccgagatcgcgccactgcactccagccggggcgcaggacagaacaagagacccggagaccccgtctgggggtgggagtgggcggcgggaaacggcgacaaaagagggagcgagaatgggagaaaacgcaaaaagagaccaataggaggtgccacacagcatcccccgcctcgcgccaagactataattaaaaagcctaccccgaggaaaacccaagagccgtcaccgctgaaacaggaggcgaaaacctttctcgcgacattgccaagcaggagcgaacagcccggaaacgccccggagtttacgagctagtctctgtcattgagccatcaagaaggaaaaaccactcagaccgcgttctctccctctcactccccaatacggagacaagaacgatcatcaatggctgacggcagttgcagcgaaacaacacgccaaaaagccggcttcacgctcaggagaaaaacgctacctctcttcctcgtggttttcggtgctctacacgttcagagaaacttctctagtaacacactatagcggacgcgtgggcggacgcgtgggcga

SEQ ID NO: 158889 - DNA, 464 bp, Homo sapiens; identical to SEQ ID NO: 133592

SEQ ID NO: 158890 - DNA, 846 bp, Homo sapiens
  misc_feature (1)...(846): n = a,t,c or g
gtgaacaggacccgtcgccatgggccgtgtgatccgtggacagaggaagggcgccgggtctgtgttccgcgcgcacgtgaagcaccgtaaaggcgctgcgcgcctgcgcgccgtggatttcgctgagcggcacggctacatcaagggcatcgtcaaggacatcatccacgacccgggccgcggcgcgcccctcgccaaggtggtcttccgggatccgtatcggtttaagaagcggacggagctgttcattgccgccgagggcattcacacgggccagtttgtgtattgcggcaagaaggcccagctcaacattggcaatgtgctccctgtgggcaccatgcctgagggtacaatcgtgtgctgccttggaggagaagcttggaagacccgtggcaagcttgcccgggcatcagggaactatgccaccgttatctcccacaacccctgagaccaagaagacccgtgtgaagctgccctccggctcccaagaaggttatctcctcagccaacagagctgtggttggtgtggtggctggagggtggcccgaattgacaaacccatctttgaaggctggcccgggcgtaccacaaatataaggcaaagagnagaggaactgctggccaccgaatacggggtggtggccatgaatcctgtggagcatacttttggaggggggcaaccccccagcacatcgcaagccctccgaccatccgcagagatgcccctntggccgcaaagtgggtctcattgctgcccgccggactggacgtctccggggaaccaagactgtgcaggagaaagagaactagtgctgagggcctcaataaagtttgtgtttatgccaa

SEQ ID NO: 158891 - DNA, 349 bp, Homo sapiens
acggtaatagtccattttacaaaaggctaaggctaaaatactagaatttgcaacccctaccactaaaaaggaggcccagaaatttattggcttgtttggatactggagacatcatatgccccacatgggtaacattttacaacctctgcgtgcagtcactagaaaacgctatgactttcactggggacagaaagagagcgtggcttttcaacaagctgaacaagcggtgcaactgaccccagatctatggcccatacgaaacaggccagtagaactgcaagtagctgtcctagatcaacatgctaattggagtcttaggcagaaacaaggtgggaagagggtacctttg

SEQ ID NO: 158892 - DNA, 759 bp, Homo sapiens
ttattgcctttcttcttgtttcactgtgtatgctgttgcttcttgtgttgaatgcttagctactttatttttaaccttttgtttcctgatagatataacccatacagttccatctaactggtgttttagaaaactgggcgctaactgaagagtgtgtctgtccccgctgaagctgcctgtgggacgtggaatgagacaatcgggcactgtgcagcgggctcgccacccgatcacctggcgcctcttcataagaggtgaaagcggctcagagtccctctcaagtgttagctggggcatcttctgaagatcaaaaagtgattcagctgctgatctgcccagccgcagagccaggctctctggcactggtgaaaaggcctctgagaacaaaggggaccctgtgcacctgtaggctgatggaggttttgtcccacttgaagactctctgtgtatgtgattccctgcttgggcctccagtccatctgctgccctctccatcgggctcactgtccaagtggctggcctgcagggtctgccatgggctccctgggttgtgccactgggaagcactggcaggcgatcctctggagagctggaggaaagtgaggcaggatatctatccacctcctccactgatggcttgctgggttcatttaaggagggctgcagctcctgttgatagacctttcctgtagctgcagttcttactgcattcaggtaaatgttcctttcccttgcacattcaggctgattggtggtcat

SEQ ID NO: 158893 - DNA, 1138 bp, Homo sapiens
cttccaagttgttgataaacatccttttctttattcttcttcaagatttattttcttggccttcccaagctgctttcgcagactttctgcctggctctttcaaatccacagcagcccctctctttatatgcccaccttcctttcttaaacacgcacacattctccaagcatgtccgtgacagccgttctttgcatcaaggagcacttacaaatgatccagagaccgaggagaatactgtctaggcacacctgctggagactcctccccgaaactctccaacatccctcttgccagatacaatcaacatgtgaagataatgaagaccaagaaaaaagcctcctagggcataggatacagctgatcctcctccctacattcagcgattggcctgctctgctctcgctcctccgacagcttcacctgctcctcttcatgttcctgtgcctggggtccaggggctcatccaggcagtgctgctcgtcttgatttttgttctcagaaagagaataaaattgacagttgagcttttccaaatcacaaataaagccatcagcagtgctcccttcctgctgttccagccactgtggacatttgccatcctcattttcttctgggtcctctgggtggctgtgctgctgagcctgggaactgcctgtggccgacccaggtgcacagggtccctttgttctcagaggccttttcaccagtgccagagagcctggctctgcggctgggcagatcagcagctgaatcactttttgatcttcagaagatgccccagctaacacttgagagggactctgagccgctttcacctctccagtgttcattaaggtggtctggaagctccagagtctgtacaatagaagagaaccatattggattttggcagggagtggacttcccgcgaggtctgtgctgcagttagaagatttaatcacaggactgcacacagcatacaccgtgtacttgggatacacaaaggggtgagctgtttcccggctttcgccctgaagccagagcgcccctgaacgtttgtctaaaccaatggttctcaagccccccgcgccccccggtgactttttgcccctgatatggcatttggcaatgtgtggacacatttttgggttgtcgtgg

SEQ ID NO: 158894 - DNA, 381 bp, Homo sapiens
ggcacgaggcatacgcacctcggatattctttgagggttccagacctccatgggttactcccagatcacagcaagactgttctgaatacctcagatttctccttgacaggctccatgaagaagaaaagatcttgaaagttcaggcctcacacaagccttctgaaattctggaatgcagtgaaacttctttacaggaagtagctagtaaagcagcagtactaacagagacccctcgtacaagtgacggtgagaagactttaatagaaaaaatgtttggaggaaaactacgaactcacatacgttgtttgaactgcacgagtacctcacaaaaagtggaagcctttacagatctttcgcttgccttttggccttcctcttctg

SEQ ID NO: 158895 - DNA, 371 bp, Homo sapiens
  misc_feature (1)...(371): n = a,t,c or g
ggcacgaggcaggaaggaaacacaactgtattagtagaggtaaactgtgagacagattttgtttctagaaatttaaaatttcaactgttggtccagcaagtagcccttggaaccatgatgcattgtcagaccctaaaggatcaaccctctgcatacagtaaagtaagtttgggatttgtctccagtgtgctgaatttgctgtcctcattgggtcttttgctgttcctattgtagacattctcatgtctcattctgttacttcacatctctgcttaaatgctatctctttgcatagaattacccttcccccgttgctatatccccgtgtcatgctgcatttaaaattttttattatggtgcttatatattan

SEQ ID NO: 158896 - DNA, 356 bp, Homo sapiens
ggcacgagtggatgcaccttacccaacctgaattacaggaattaacatctttattaacagtcaactccgagttcgtggactggcggaagttcctgttagtaacctcaatgccttggcccattcccttggaggaggagctccttgagacccttcagaagttcaaggctgtggataaggagcagttgggcaccatcacttttgagcagtatatgcaggctggtctgtggtttacaggagatgaagatataaaaattccagaaaatcctcttgaaccccttccatttaataggcaggagcatcttatagagtttttctttaggctatttgctgactatgagaaggatccaccccagctt

SEQ ID NO: 158897 - DNA, 376 bp, Homo sapiens
  misc_feature (1)...(376): n = a,t,c or g
ggcacgagagggcctgtggaagtctaagttcacccctgagaacaccacgaaggaactgttctacaaggctgatggagagtcttgttcaacatctatgatgtaccaggaaggcaagttcccttatcgacacatggctgaaagcacccaggtgcttgagttgcccttcaaaggggattacatcaccatgggcctcatcttgtccaagcctgacaagatcctggcccccgtagacaaagaactcaccccaaaggtgctgcctgactggctggatgaattggaggacatgatgcttgtggtccacatgccccgcttactcattgaggacggcttcagcttgaaggatcagcttcctgacaatggccttgtccatctgaan

SEQ ID NO: 158898 - DNA, 482 bp, Homo sapiens
caaattccagaatgcgctattagttcgttacaccaagaaagtaccccaagtgtcaactccaactcttgtagaggtctcaagaaacctaggaaaagtgggcagcaaatgttgtaaacatcctgaagcaaaaagaatgccctgtgcagaagactatctatccgtggtcctgaaccagttatgtgtgttgcatgagaaaacgccagtaagtgacagagtcaccaaatgctgcacagaatccttggtgaacaggcgaccatgcttttcagctctggaagtcgatgaaacatacgttcccaaagagtttaatgctgaaacattcaccttccatggtgaaacacaagcccaaggcaacaaaagagcaactgaaagctgttatggatgatttcgcagcttttgtagagaagtgctgcaaggctgacgataaggagacctgctttgccgaagaaggtaaaaaacttgttgctgcaagtcaagctgcctta

SEQ ID NO: 158899 - DNA, 536 bp, Homo sapiens
  misc_feature (1)...(536): n = a,t,c or g
gggcatgtttttgtatgaatatgcaagaaggcatcctgattactctgtcgtgctgctgctgagacttgccaagacatatgaaaccactctagagaagtgctgtgccgctgcagatcctcatgaatgctatgccaaagtgttcgatgaatttaaacctcttgtggaagagcctcagaatttaatcaaacaaaattgtgagctttttgagccagatatatgcacactttctgagaaggagagacaaatcaagaaacaaactgcacttgttgagcttgtgaaacacaagcccaaggcaacaaaagagcaactgaaagctgttatggatgatttcgcagcttttgtagagaagtgctgcaaggctgacgataaggagacctgctttgccgaggagggtaaaaaacttgttgctgcaagtcaagctgccttaggcttataacatcacatttaaaagcatctcagcctcccctgagaattagagaaagaaaatgaagatccaaagcttattcntctgtttttctntttcgttggtgtaaagc

SEQ ID NO: 158900 - DNA, 732 bp, Homo sapiens
  misc_feature (1)...(732): n = a,t,c or g
gcggtcgcttttttttttgaaagtaaggatgtttgcaaaaactatgctgaggcaaaggatgtcttcctgggcatgtttttgtatgaatatgcaagaaggcatcctgattactctgtcgtgctgctgctgagacttgccaagacatatgaaaccactctagagaagtgctgtgccgctgcagatcctcatgaatgctatgccaaagtgttcgatgaatttaaacttcttgtggaagagcctcagaatttaatcaaacaagcttggagagtacaaattccagaatgcgctattagttcgttacaccaagaaagtaccccaagtgtcaactccaactcttgtagaggtctcaagaaacctaggaaaagtgggcagcaaatgttgtaaacatcctgaagcaaaaagaatgccctgtgcagaagactatctatccgtggtcctgaaccagttatgtgtgttgcatgagaaaacgccagtaagtgacagagtcaccaaatgctgcacagaatccttggtgaacaggcgaccatgcttttcagctctggaagtcgatgaaacatacgttcccaaagagtttaatgctgaaacattcaccttccatgcagatatatgcacactttctgagaaggagagacaaatcaagaaacaaactgcacttgttgagctcgtgaaacacaagcccaaggcaacaaaagancaactgaaagctgttatggatgatttcgcagcttttgt

SEQ ID NO: 158901 - DNA, 475 bp, Homo sapiens
  misc_feature (1)...(475): n = a,t,c or g
cggagtgggcatgtttttgtatgaatatgcaagaaggcatcctgattactctgtcgtgctgctgctgagacttgccaagacatatgatgcagaagactatctatccgtggtcctgaaccagttatgtgtgttgcatgagaaaacgccagtaagtgacagagtcaccaaatgctgcacagaatccttggtgaacaggcgaccatgcttttcagctctggaagtcgatgaaacatacgttcccaaagagtttaatgctgaaacattcaccttccatgcagatatatgcacactttctgagaaggagagacaaatcaagaaacaaactgcacttgttgagctcgtgaaacacaagcccaaggcaacaaaagagcaactgaaagctgttntggatgatttcgcngcttttgtagagaagtgctgcaagggtgacganaagggagaactgctttgncgaagganggtanaaaacttgttg

SEQ ID NO: 158902 - DNA, 641 bp, Homo sapiens
gaattctcgatgttggaaaaatcccactgcattgccgaagtggaaaatgatgagatgcctgctgacttgccttcattagctgctgattttgttgaaagtaaggatgtttgcaaaaactatgctgaggcaaaggatgtcttcctgggcatgtttttgtatgaatatgcaagaaggcatcctgattactctgtcgtgctgctgctgagacttgccaagacatatgaaaccactctagagaagtgctgtgccgctgcagatcctcatgaatgctatgccaaagtgttcgatgaatttgtgaacaggcgaccatgcttttcagctctggaagtcgatgaaacatacgttcccaaagagtttaatgctgaaacattcaccttccatgcagatatatgcacactttctgagaaggagagacaaatcaagaaacaaactgcacttgttgagcttgtgaaacacaagcccaaggcaacaaaagagcaactgaaagctgttatggatgatttcgcagcttttgtagagaagtgctgcaaggctgacgataaggagacctgctttgccgaggagggtaaaaaacttgttgctgcaagtcaagctgccttaggcttataacatcccatttaaaagcatctcagcctaccctg

SEQ ID NO: 158903 - DNA, 1043 bp, Homo sapiens
  misc_feature (1)...(1043): n = a,t,c or g
gccaagtatatctgtgaaaatcaagattcgatctccagtaaactgaaggaatgctgtgaaaaacctctgttggaaaaatcccactgcattgccgaagtggaaaatgatgagatgcctgctgacttgccttcattagctgctgattttgttgaaagtaaggatgtttgcaaaaactatgctgaggcaaaggatgtcttcctgggcatgtttttgtatgaatatgcaagaaggcatcctgattactctgtcgtgctgctgctgagacttgccaagacatatgaaaccactctagagaagtgctgtgccgctgcagatcctcatgaatgctatgccaaagtgttcgatgaatttaaacctcttgtggaagagcctcagaatttaatcaaacaaaattgtgagctttttgagcagcttggagagtacaaattccagaatgcgctattagttcgttacaccaagaaagtaccccaagtgtcaactccaactcttgtagaggtctcaagaaacctaggaaaagtgggcagcaaatgttgtaaacatcctgaagcaaaaagaatgccctgtgcagaagactatctatcccgtggtcccngaaccagtaggatgtttgcaaaaactatgctgaggcaaaggatgtcttcctgggcatgtttttgtatgaatatgcaagaaggcatcctgattactctgtcgtgctgctgctgagacttgccaagacatatgaaaccactctagagaagtgctgtgccgctgcagatcctcatgaatgctatgccaaagtgttcgatgaatttaaacctcttgtggaagagcctcagaatttaatcaaacaaaattgtgagctttttgagcagcttggagagtacaaattccagaatgcgctattagttcgttacaccaagaaagtaccccaagtgtcaactccaactcttgtagaggtctcaagaaacctaggaaaagtgggcagcaaatgttgtaaacatcctgaagcaaaaagaatgccctgtgcagaagactatctatcccgtggtcccngaaccagt

SEQ ID NO: 158904 - DNA, 2194 bp, Homo sapiens
atgaagtgggtaacctttatttcccttctttttctctttagctcggcttattccaggggtgtgtttcgtcgagatgcacacaagagtgaggttgctcatcggtttaaagatttgggagaagaaaatttcaaagccttggtgttgattgcctttgctcagtatcttcagcagtgtccatttgaagatcatgtaaaattagtgaatgaagtaactgaatttgcaaaaacatgtgttgctgatgagtcagctgaaaattgtgacaaatcacttcataccctttttggagacaaattatgcacagttgcaactcttcgtgaaacctatggtgaaatggctgactgctgtgcaaaacaagaacctgagagaaatgaatgcttcttgcaacacaaagatgacaacccaaacctcccccgattggtgagaccagaggttgatgtgatgtgcactgcttttcatgacaatgaagagacatttttgaaaaaatacttatatgaaattgccagaagacatccttacttttatgccccggaactccttttctttgctaaaaggtataaagctgcttttacagaatgttgccaagctgctgataaagctgcctgcctgttgccaaagctcgatgaacttcgggatgaagggaaggcttcgtctgccaaacagagactcaagtgtgccagtctccaaaaatttggagaaagagctttcaaagcatgggcagtagctcgcctgagccagagatttcccaaagctgagtttgcagaagtttccaagttagtgacagatcttaccaaagtccacacggaatgctgccatggagatctgcttgaatgtgctgatgacagggcggaccttgccaagtatatctgtgaaaatcaagattcgatctccagtaaactgaaggaatgctgtgaaaaacctctgttggaaaaatcccactgcattgccgaacaagaaacctaggaaaagtgggcagcaaatgttgtaaacatcctgaagcaaaaagaatgccctgtgcagaagactatctatccgtggtcctgaaccagttatgtgtgttgcatgagaaaacgccagtaagtgacagagtcaccaaatgctgcacagaatccttggtgaacaggcgaccatgcttttcagctctggaagtcgatgaaacatacgttcccaaagagtttaatgctgaaacattcaccttccatgcagatatatgcacactttctgagaaggagagacaaatcaagaaacaaactgcacttgttgagctcgtgaaacacaagcccaaggcaacaaaagagcaactgaaagctgttatggatgatttcgcagcttttgtagagaagtgctgcaaggctgacgataaggagacctgctttgccgaggagggtaaaaaacttgttgctgcaagtcaagctgccttaggcttataacatcacatttaaaagcatctcaggtaactatattttgaattttttaaaaaagtaactataatagttattattaaaatagcaaagattgaccatttccaagagccatatagaccagcaccgaccactattctaaactatttatgtatgtaaatattagcttttaaaattctcaaaatagttgctgagttgggaaccactattatttctattttgtagatgagaaaatgaagataaacatcaaagcatagattaagtaattttccaaagggtcaaaattcaaaattgaaaccaaggtttcagtgttgcccattgtcctgttctgacttatatgatgcggtacacagagccatccaagtaagtgatggctcagcagtggaatactctgggaattaggctgaaccacatgaaagagtgctttatagggcaaaaacagttgaatatcagtgatttcacatggttcaacctaatagttcaactcatcctttccattggagaatatgatggatctaccttctgtgaactttatagtgaagaatctgctattacatttccaatttgtcaacatgctgagctttaataggacttatcttcttatgacaacatttattggtgtgtccccttgcctagcccaacagaagaattcagcagccgtaagtctaggacaggcttaaattgttttcactggtgtaaattgcagaaagatgatctaagtaatttggcatttattttaataggtttgaaaaacacatgccattttacaaataaga

SEQ ID NO: 158905 - DNA, 748 bp, Homo sapiens
  misc_feature (1)...(748): n = a,t,c or g
gctgacttgccttcattagctgctgattttgttgaaagtaaggatgtttgcaaaaactatgctgaggcaaaggatgtcttcctgggcatgtttttgtatgaatatgcaagaaggcatcctgattactctgtcgtgctgctgctgagacttgccaagacatatgaaaccactctagagaagtgctgtgccgctgcanatcctcatgaatgctatgccaaagtgttcgatgaatttaaacctcttgtggaagagcctcagaatttaatcaaacaaaattgtgagctttttgagcagcttggagagtacaaattccagaatgcgctattagttcgttacaccaagaaagtaccccaagtgtcaactccaactcttgtagaggtctcaagaaacctaggaaaagtgggcagcaaatgttgtaaacatcctgaagcaaaaagaatgcccgtgaacaggcgaccatgcttttcagctctggaagtcgatgaaacatacgttcccaaagagtttaatgctgaaacattcaccttccatgcagatatatgcacactttctgagaaggagagacaaatcaagaaacaaactgcacttgttgagcttgtgaaacacaagcccaaggcaacaaaagagcaactgaaagctgttatggatgatttcgcagcttttgtagagaagtgctgcaaggctgacgataaggagacctgctttgccgaggaaggtaaaaaacttgttgctgcaagtcaagctgcct

SEQ ID NO: 158906 - DNA, 1518 bp, Homo sapiens
atgaagtgggtaacctttatttcccttctttttctctttagctcggcttattccaggggtgtgtttcgtcgagatgcacacaagagtgaggttgctcatcggtttaaagatttgggagaagaaaatttcaaagccttggtgttgattgcctttgctcagtatcttcagcagtgtccatttgaagatcatgtaaaattagtgaatgaagtaactgaatttgcaaaaacatgtgttgctgatgagtcagctgaaaattgtgacaaatcacttcataccctttttggagacaaattatttgtagaggtctcaagaaacctaggaaaagtgggcagcaaatgttgtaaacatcctgaagcaaaaagaatgccctgtgcagaagactatctatccgtggtcctgaaccagttatgtgtgttgcatgagaaaacgccagtaagtgacagagtcaccaaatgctgcacagaatccttggtgaacaggcgaccatgcttttcagctctggaagtcgatgaaacatacgttcccaaagagtttaatgctgaaacattcaccttccatgcagatatatgcacactttctgagaaggagagacaaatcaagaaacaaactgcacttgttgagcttgtgaaacacaagcccaaggcaacaaaagagcaactgaaagctgttatggatgatttcgcagcttttgtagagaagtgctgcaaggctgacgataaggagacctgctttgccgaggagggtaaaaaacttgttgctgcaagtcaagctgccttaggcttaacctgtgaagcctgccaggagccgggaggcctggtggtgcctcccacagatgccccggtgagccccaccactctgtatgtggaggacatctcggaaccgccgttgcacgatttctactgcagcaggctactggacctggtcttcctgctggatggctcctccaggctgtccgaggctgagtttgaagtgctgaaggcctttgtggtggacatgatggagcggctgcgcatctcccagaagtgggtccgcgtggccgtggtggagtaccacgacggctcccacgcctacatcgggctcaaggaccggaagcgaccgtcagagctgcggcgcattgccagccaggtgaagtatgcgggcagccaggtggcctccaccagcgaggtcttgaaatacacactgttccaaatcttcagcaagatcgaccgccctgaagcctcccgcatcgccctgctcctgatggccagccaggagccccaacggatgtcccggaactttgtccgctacgtccagggcctgaagaagaagaaggtcattgtgatcccggtgggcattgggccccatgccaacctcaagcagatccgcctcatcgagaagcaggcccctgagaacaaggccttcgtgctgagcagtgtggatgagctggagcagcaaagggacgagatcgttagctacctctgtgaccttgcccctgaagcccctcctcctactctgccccccgacatggcacaagtctaa

SEQ ID NO: 158907 - DNA, 3977 bp, Homo sapiens
atgaagtgggtaacctttatttcccttctttttctctttagctcggcttattccaggggtgtgtttcgtcgaacccccctgggccctgccagctccctgccccagagcttcctgctcaagtgcttagagcaagtgaggaagatccagggcgatggcgcagcgctccaggagaagctgtgtgccacctacaagctgtgccaccccgaggagctggtgctgctcggacactctctgggcatcccctgggctcccctgagctcctgccccagccaggccctgcagctggcaggctgcttgagccaactccatagcggccttttcctctaccaggggctcctgcaggccctggaagggatatcccccgagttgggtcccaccttggacacactgcagctggacgtcgccgactttgccaccaccatctggcagcagatggaagaactgggaatggcccctgccctgcagcccacccagggtgccatgccggccttcgcctctgctttccagcgccgggcaggaggggtcctggttgctagccatctgcagagcttcctggaggtgtcgtaccgcgttctacgccaccttgcgcagcccggtggaggcggtgatgcacacaagagtgaggttgctcatcggtttaaagatttgggagaagaaaatttcaaagccttggtgttgattgcctttgctcagtatcttcagcagtgtccatttgaagatcatgtaaaattagtgaatgaagtaactgaatttgcaaaaacatgtgttgctgatgagtcagctgaaaattgtgacaaatcacttcataccctttttggagacaaattatgcacagttgcaactcttcgtgaaacctatggtgaaatggctgactgctgtgcaaaacaagaacctgagagaaatgaatgcttcttgcaacacaaagatgacaacccaaacctcccccgattggtgagaccagaggttgatgtgatgtgcactgcttttcatgacaatgaagagacatttttgaaaaaatacttatatgaaattgccagaagacatccttacttttatgccccggaactccttttctttgctaaaaggtataaagctgcttttacagaatgttgccaagctgctgataaagctgcctgcctgttgccaaagctcgatgaacttcgggatgaagggaaggcttcgtctgccaaacagagactcaagtgtgccagtctccaaaaatttggagaaagagctttcaaagcatgggcagtagctcgcctgagccagagatttcccaaagctgagtttgcagaagtttccaagttagtgacagatcttaccaaagtccacacggaatgctgccatggagatctgcttgaatgtgctgatgacagggcggaccttgccaagtatatctgtgaaaatcaagattcgatctccagtaaactgaaggaatgctgtgaaaaacctctgttggaaaaatcccactgcattgccgaagtggaaaatgatgagatgcctgctgacttgccttcattagctgctgattttgttgaaagtaaggatgtttgcaaaaactatgctgaggcaaaggatgtcttcctgggcatgtttttgtatgaatatgcaagaaggcatcctgattactctgtcgtactgctgctgagacttgccaagacatatgaaaccactctagagaagtgctgtgccgctgcagatcctcatgaatgctatgccaaagtgttcgatgaatttaaacctcttgtggaagagcctcagaatttaatcaaacaaaattgtgagctttttgagcagcttggagagtacaaattccagaatgcgctattagttcgttacaccaagaaagtaccccaagtgtcaactccaactcttgtagaggtctcaagaaacctaggaaaagtgggcagcaaatgttgtaaacatcctgaagcaaaaagaatgccctgtgcagaagactatctatccgtggtcctgaaccagttatgtgtgttgcatgagaaaacgccagtaagtgacagagtcaccaaatgctgcacagaatccttggtggaaaatgatgagatgcctgctgacttgccttcattagctgctgattttgttgaaagtaaggatgtttgcaaaaactatgctgaggcaaaggatgtcttcctgggcatgtttttgtatgaatatgcaagaaggcatcctgattactctgtcgtgctgctgctgagacttgccaagacatatgaaaccactctagagaagtgctgtgccgctgcagatcctcatgaatgctatgccaaagtgttcgatgaatttaaacctcttgtggaagagcctcagaatttaatcaaacaaaattgtgagctttttgagcagcttggagagtacaaattccagaatgcgctattagttcgttacaccaagaaagtaccccaagtgtcaactccaactcttgtagaggtctcaagaaacctaggaaaagtgggcagcaaatgttgtaaacatcctgaagcaaaaagaatgccctgtgcagaagactatctatccgtggtcctgaaccagttatgtgtgttgcatgagaaaacgccagtaagtgacagagtcaccaaatgctgcacagaatccttggtgaacaggcgaccatgcttttcagctctggaagtcgatgaaacatacgttcccaaagagtttaatgctgaaacattcaccttccatgcagatatatgcacactttctgagaaggagagacaaatcaagaaacaaactgcacttgttgagctcgtgctgtgccgctgcagatcctcatgaatgctatgccaaagctgttatggatgatttcgcagcttttgtagagaagtgctgcaaggctgacgataaggagacctgctttgccgaggagggtaaaaaacttgttgctgcaagtcaagctgccttaggcttataacatcacatttaaaagcgtcaactccaactcttgtagaggtctcaagaaacctaggaaaagtgggcagcaaatgttgtaaacatcctgaagcaaaaagaatgccctgtgcagaagactatctatccgtggtcctgaaccagttatgtgtgttgcatgagaaaacgccagtaagtgacagagtcaccaaatgctgcacagaatccttggtgaacaggcgaccatgcttttcagctctggaagtcgatgaaacatacgttcccaaagagtttaatgctgaaacattcaccttccatgcagatatatgcacactttctgagaaggagagacaaatcaagaaacaaactgcacttgttgagcttgtgaaacacaagcccaaggcaacaaaagagcaactgaaagctgttatggatgatttcgcagcttttgtagagaagtgctgcaaggctgacgataaggagacctgctttgccgaaggagggtaaaaaacttgttgctgcaagtcaagctgcctttaggcttaacccccctgggccctgccagctccctgccccagagcttcctgctcaagtgcttagagcaagtgaggaagatccagggcgatggcgcagcgctccaggagaagctgtgtgccacctacaagctgtgccaccccgaggagctggtgctgctcggacactctctgggcatcccctgggctcccctgagctcctgccccagccaggccctgcagctggcaggctgcttgagccaactccatagcggccttttcctctaccaggggctcctgcaggccctggaagggatatcccccgagttgggtcccaccttggacacactgcagctggacgtcgccgactttgccaccaccatctggcagcagatggaagaactgggaatggcccctgccctgcagcccacccagggtgccatgccggccttcgcctctgctttccagcgccgggcaggaggggtcctggttgctagccatctgcagagcttcctggaggtgtcgtaccgcgttctacgccaccttgcgcagccctga

SEQ ID NO: 158908 - DNA, 6124 bp, Homo sapiens
atgaagtgggtaacctttatttcccttctttttctctttagctcggcttattccaggggtgtgtttcgtcgagatgcacacaagagtgaggttgctcatcggtttaaagatttgggagaagaaaatttcaaagccttggtgttgattgcctttgctcagtatcttcagcagtgtccatttgaagatcatgtaaaattagtgaatgaagtaactgaatttgcaaaaacatgtgttgctgatgagtcagctgaaaattgtgacaaatcacttcataccctttttggagacaaattatgcacagttgcaactcttcgtgaaacctatggtgaaatggctgactgctgtgcaaaacaagaacctgggagaaatgaatgcttcttgcaacacaaagatgacaacccaaacctcccccgattggtgagaccagaggttgatgtgatgtgcactgcttttcatgacaatgaagagacatttttgaaaaaatacttatatgaaattgccagaagacatccttacttttatgccccggaactccttttctttgctaaaaggtataaagctgcttttacagaatgttgccaagctgctgataaagctgcctgcctgttgccaaagctcgatgaacttcgggatgaagggaaggcttcgtctgccaaacagagactcaagtgtgccagtctccaaaaatttggagaaagagctttcaaagcatgggcagtagctcgcctgagccagagatttcccaaagctgagtttgcagaagtttccaagttagtgacagatcttaccaaagtccacacggaatgctgccatggagatctgcttgaatgtgctgatgacagggcggaccttgccaagtatatctgtgaaaatcaagattcgatctccagtaaactgaaggaatgctgtgaaaaacctctgttggaaaaatcccactgcattgccgaagtggaaaatgatgagatgcctgctgacttgccttcattagctgctgattttgttgaaagtaaggatgtttgcaaaaactatgctgaggcaaaggatgtcttcttgggcatgtttttgtatgaatatgcaagaaggcatcctgattactctgtcgtgctgctgctgagacttgccaagacatatgaaaccactctagagaagtgctgtgccgctgcagatcctcatgaatgctatgccaaagtgttcgatgaatttaaacctcttgtggaagagcctcagaatttaatcaaacaaaattgtgagctttttgagcagcttggagagtacaaattccagaatgcgctattagttcgttacaccaagaaagtaccccaagtgtcaactccaactcttgtagaggtctcaagaaacctaggaaatttaaagatttgggagaagaaaatttcaaagccttggtgttgattgcctttgctcagtatcttcagcagtgtccatttgaagatcatgtaaaattagtgaatgaagtaactgaatttgcaaaaacatgtgttgctgatgagtcagctgaaaattgtgacaaatcacttcataccctttttggagacaaattatgcacagttgcaactcttcgtgaaacctatggtgaaatggctgactgctgtgcaaaacaagaacctgggagaaatgaatgcttcttgcaacacaaagatgacaacccaaacctcccccgattggtgagaccagaggttgatgtgatgtgcactgcttttcatgacaatgaagagacatttttgaaaaaatacttatatgaaattgccagaagacatccttacttttatgccccggaactccttttctttgctaaaaggtataaagctgcttttacagaatgttgccaagctgctgataaagctgcctgcctgttgccaaagctcgatgaacttcgggatgaagggaaggcttcgtctgccaaacagagactcaagtgtgccagtctccaaaaatttggagaaagagctttcaaagcatgggcagtagctcgcctgagccagagatttcccaaagctgagtttgcagaagtttccaagttagtgacagatcttaccaaagtccacacggaatgctgccatggagatctgcttgaatgtgctgatgacagggcggaccttgccaagtatatctgtgaaaatcaagattcgatctccagtaaactgaaggaatgctgtgaaaaacctctgttggaaaaatcccactgcattgccgaagtggaaaatgatgagatgcctgctgacttgccttcattagctgctgattttgttgaaagtaaggatgtttgcaaaaactatgctgaggcaaaggatgtcttcttgggcatgtttttgtatgaatatgcaagaaggcatcctgattactctgtcgtgctgctgctgagacttgccaagacatatgaaaccactctagagaagtgctgtgccgctgcagatcctcatgaatgctatgccaaagtgttcgatgaatttaaacctcttgtggaagagcctcagaatttaatcaaacaaaattgtgagctttttgagcagcttggagagtacaaattccagaatgccgctattagttcgttacaccaagaaagtaccccaagtgtcaactccaactcttgtagaggtctcaagaaacctaggaaaagtgggcagcaaatgttgtaaacatcctgaagcaaaaagaatgccctgtgcagaagactatctatccgtggtcctgaaccagttatgtgtgttgcatgagaaaacgccagtaagtgacagagtcaccaaatgctgcacagaatccttggtgaacaggcgaccatgcttttcagctctggaagtcgatgaaacatacgttcccaaagagtttaatgctgaaacattccaccttccatgcagatatatgcacactttctgagaaggagagacaaatccagaaaacaaactgcacttgttgagcttggtgaaacacaagccccaaggcaacaaaagagcaactgaaagctgttatggatgatttcgcagcttttgtagagaagtgctgccaaggctgacgataaggagacctgctttgccgaggagggtaaaaaacttgttgctgcaagtcaagctgcccttaggcttaacccccctgggccctgccagctccctgccccagagcttcctgctcaagtgcttagagcaagtgaggaagatccagggcgatggcgcagcgctccaggagaagctgtgtgccacctacaagctgtgccaccccgaggagctggtgctgctcggacactctctgggcatcccctgggctcccctgagctcctgccccagccaggccctgcagctggcaggctgcttgagccaactccatagcggccttttcctctaccaggggctcctgcaggccctggaagggatatcccccgagttgggtcccaccttggacacactgcagctggacgtcgccgactttgccaccaccatctggcagcagatggaagaactgggaatggcccctgccctgcagcccacccagggtgccatgccggccttcgcctctgctttccagcgccgggcaggaggggtcctggttgctagccatctgcagagcttcctggaggtgtcgtaccgcgttctacgccaccttgcgcagcccggtggaggcggtgatgcacacaagagtgaggttgctcatcggtttaaagatttgggagaagaaaatttcaaagccttggtgttgattgcctttgctcagtatcttcagcagtgtccatttgaagatcatgtaaaattagtgaatgaagtaactgaatttgcaaaaacatgtgttgctgatgagtcagctgaaaattgtgacaaatcacttcataccctttttggagacaaattatgcacagttgcaactcttcgtgaaacctatggtgaaatggctgactgctgtgcaaaacaagaacctgagagaaatgaatgcttcttgcaacacaaagatgacaacccaaacctcccccgattggtgagaccagaggttgatgtgatgtgcactgcttttcatgacaatgaagagacatttttgaaaaaatacttatatgaaattgccagaagacatccttacttttatgccccggaactccttttctttgctaaaaggtataaagctgcttttacagaatgttgccaagctgctgataaagctgcctgcctgttgccaaagctcgatgaacttcgggatgaagggaaggcttcgtctgccaaacagagactcaagtgtgccagtctccaaaaatttggagaaagagctttcaaagcatgggcagtagctcgcctgagccagagatttcccaaagctgagtttgcagaagtttccaagttagtgacagatcttaccaaagtccacacggaatgctgccatggagatctgcttgaatgtgctgatgacagggcggaccttgccaagtatatctgtgaaaatcaagattcgatctccagtaaactgaaggaatgctgtgaaaaacctctgttggaaaaatcccactgcattgccgaagtggaaaatgatgagatgcctgctgacttgccttcattagctgctgattttgttgaaagtaaggatgtttgcaaaaactatgctgaggcaaaggatgtcttcctgggcatgtttttgtatgaatatgcaagaaggcatcctgattactctgtcgtactgctgctgagacttgccaagacatatgaaaccactctagagaagtgctgtgccgctgcagatcctcatgaatgctatgccaaagtgttcgatgaatttaaacctcttgtggaagagcctcagaatttaatcaaacaaaattgtgagctttttgagcagcttggagagtacaaattccagaatgcgctattagttcgttacaccaagaaagtaccccaagtgtcaactccaactcttgtagaggtctcaagaaacctaggaaaagtgggcagcaaatgttgtaaacatcctgaagcaaaaagaatgccctgtgcagaagactatctatccgtggtcctgaaccagttatgtgtgttgcatgagaaaacgccagtaagtgacagagtcaccaaatgctgcacagaatccttggtgaacaggcgaccatgcttttcagctctggaagtcgatgaaacatacgttcccaaagagtttaatgctgaaacattcaccttccatgcagatatatgcacactttctgagaaggagagacaaatcaagaaacaaactgcacttgttgagcttgtgaaacacaagcccaaggcaacaaaagagcaactgaaagctgttatggatgatttcgcagcttttgtagagaagtgctgcaaggctgacgataaggagacctgctttgccgaggagggtaaaaaacttgttgctgcaagtcaagactgccttaggcttaacctgtgaagcctgccaggagccgggaggcctggtggtgcctcccacagatgccccggtgagccccaccactctgtatgtggaggacatctcggaaccgccgttgcacgatttctactgcagcaggctactggacctggtcttcctgctggatggctcctccaggctgtccgaggctgagtttgaagtgctgaaggcctttgtggtggacatgatggagcggctgcgcatctcccagaagtgggtccgcgtggccgtggtggagtaccacgacggctcccacgcctacatcgggctcaaggaccggaagcgaccgtcagagctgcggcgcattgccagccaggtgaagtatgcgggcagccaggtggcctccaccagcgaggtcttgaaatacacactgttccaaatcttcagcaagatcgaccgccctgaagcctcccgcatcgccctgctcctgatggccagccaggagccccaacggatgtcccggaactttgtccgctacgtccagggcctgaagaagaagaaggtcattgtgatcccggtgggcattgggccccatgccaacctcaagcagatccgcctcatcgagaagcaggcccctgagaacaaggccttcgtgctgagcagtgtggatgagctggagcagcaaagggacgagatcgttagctacctctgtgaccttgcccctgaagcccctcctcctactctgccccccgacatggcacaagtctaa

SEQ ID NO: 158909 - DNA, 351 bp, Homo sapiens
  misc_feature (1)...(351): n = a,t,c or g
caagaatctgtgaattatctgtggctctgtttcttattaaccaataacgactcctaaaaatacaactgtttacatgtggggatgggctatagaannnnnnnnnnnnnnnnggtcaaaacctgtttttannnnnnnnnngacaggttgccaaccccccttggttgttggattatttaaaacaacttcaaatttccccatatgctggctttttaaagagggtgaggccttaaagaattttaaagctttttctcccaaacccaggccagtgaacaattaaccaaatccaagcaaggattggccttgagaaccttgcctccagtccaatttcctcctccaccacccagacctgan

SEQ ID NO: 158910 - DNA, 340 bp, Homo sapiens
tgtcggtcgggttggtcttgaactcctggcctcaagtgatctgcctacctcgggctctccaagtgctgggattacaggcatgagccactgcccctggcccaactttctgttaatctttattggatactttttcactgtgctgaccccatgtgaatactattcaggaggtatgacagtaccattatggttatagctgtggacattccttcttttatgctctgtactcatagctcttcacctttaggaactagagtagatgtaaagcatttaaagaattttaaggtttgagctatttcatgaatcaacctgaaagggccataacttgtaggtaatacgtatt

SEQ ID NO: 158911 - DNA, 370 bp, Homo sapiens
cggcaccacaaataaaacggcatttagaggtgaaagcttcgccttcctctctggaaggggagtcctcactctcccagcagcccacacctctgcctcaaaccttcatggctcccaagagactggataaagctaaggaggctcaacgcaccccaagtcctgggggtggtcagcccctctcacccctccctcatcctttcacacaagagttgtttactgttcctccagttatgcctggtcacgcagacactctgctgctcaaatgcccttaccccatcctcaggcctgctcccaggccacctgcctacagaatccaccctgtctgccaggaggccatagggaccctcgccatactgtctgctttgtgcagtgc

SEQ ID NO: 158912 - DNA, 354 bp, Homo sapiens
  misc_feature (1)...(354): n = a,t,c or g
actttgagcactctgagatatgcagatcgtgcaaaacaaattaaatgcaatgctgttatcaatgaggaccccaatgccaaactggttcgtgaattaaaggaggaggtgacacggctgaaggaccttcttcgtgctcagggcctgggagatattattgatattgatccattgatcgatgattactctggaagtggaagcaaatatctgaaagattttcagaacaataagcatagatacttgctagcctctgagaatcaacgccctggccatttttccacagcatccatggggtccctcacttcatccccatcttcctgctcactcagtagtcaggtgggcttgacgtctgtgacn

SEQ ID NO: 158913 - DNA, 454 bp, Homo sapiens
  misc_feature (1)...(454): n = a,t,c or g
ntcccgatnncccttcgctgagcacgtaataannggcgnganccacgcgtgcgagagaattcacactggggagaagccttacatatgctttgaatggggctctttttttcgaaaacactcgaatcttacgcaacatcagagaattcacactggggaaaaaccccataaatgtgacgaatgtgggaaaactttccaaacaaaggcaaacctctctcagcatcagagaattcatagtggagagaaaccctataaatgtaaagaatgtggcaaagccttttgtcagagcccatctcttattaaacaccagcgaattcatactggagaaaaaccatataagtgtaaagaatgtggcaaagcgtttactcagagcaccccactcactaaacatcagagaatacatacaggggagagaccctacaaatgcagtgaatgtggtaaagccttcattcagaaa

SEQ ID NO: 158914 - DNA, 408 bp, Homo sapiens
caaagggctcagatgtttagcctagtctactgcagacagaaatttaaatccagtgagggctaatgaatcacatacgtgtttccacattttattttgttttcgttttttaggcatatgggaagtagttgcaatttttcagggaagaatatgttttgaatctcacactgtattctccttgaatctcacactgtattcttgaatgagacaagattttgagatcattcttttcctttttgtgtcaacgttagtttgttgttcattggttataaaaaggaaaatgtggccaggcgcaatggcttacgcctgtaatcccagcactttgggagacagaggcaggcagatcacaaggtcaggagttcaagaccagcctggccaatatggtgaaacctcgtctctactaaaaaaaaa

SEQ ID NO: 158915 - DNA, 386 bp, Homo sapiens
cccacgcgttcgggtacttttaagtcaggagttctgtacaaaggacatggggagatccccaattgggctgatgaaaacagcgtggatgaagcggaggtttgcgcttcataactcctaagccgaggcctctatatcctcttattctcagatgagaaaagcgacctgtcattcaggattcatagcccaggcttggtccatgcattcaaaaccctaccctgcagataattttctaggcatatggtgccgctggaaacttctagagcaatttgcacttctttaatttcttcactttagctagtgacatgggttctaactaacattagccacttgacagagaggactcaagaaggaacactaatggggattgtacgaataccgcagtactg

SEQ ID NO: 158916 - DNA, 462 bp, Homo sapiens
  misc_feature (1)...(462): n = a,t,c or g
ggatgttccggggggngggcctgaaaactgagtaccatcaanacgnccagcttggcacgaggcacaacatcagcgcgagccaggtcaacgcgtggcacgtggcggagtcggccgtcaactacagcctgggcgatgagcagggcttctgtggcagcccctggcccaactgcaacttccccgagtacttcacctacagcgtgctgctcagcctgctggcctgctccgtgttcctgcagatcaactgcatcgggaagctggtgctcatgctggccatcgagctcatctacgtgctcatcgtggaggtgccaggtgtcacgctcttcgacaacgccgacctgctggtcaccgccaacgccatagacttcttcaacaacgggacctcccagtgccctgagcatgcaaccaaggtggcattgaaggtggtgacgcccatcatcatctcagtctttgtgctggccctgg

SEQ ID NO: 158917 - DNA, 1098 bp, Homo sapiens
atgcactggggggttggctttgcttcgtccaggccgtgcgtggtggatctgagctggaaccagagcatctccttcttcggctggtgggccgggtccgaggagcccttctccttttatggggacatcatcgctttccctttgcaggattacggtgggatcatggcagggctgggctccgatccctggtggaagaaaaccctttacttgaccgggggagctttgctggccgcagctgcgtatctgctccacgaactcctggtcattaggaaacagcaagagattgactctaaagatgctattattttgcatcagtttgcaagacctaacaatggtgttccaagtttatctcctttctgtttaaagatggaaacttatttaaggatggctgacttaccgtatcagaactattttggtggaaaactctctgctcaagggaaaatgccttggattgaatataatcatgaaaaagtttctggcacagaattcataattgactttctggaagagaagcttggagtgaatttaaacaaaaaccttggccctcatgaaagagccatctccagagcggtgaccaagatggtggaggagcacttctactgccttgagctggcggtggtaccatcctgtacccacgtgccccttacagaagttcttgcagttcgtcaggcagctgatgctcttcatgcgtacaccttcaccctctgctctgcccggacattagcttattgccagtgggtggacaatctcaatgagacccggaagatgctctctcttagtggtggtggtcccttcagcaacctgctgaggtgggttgtgtgccacataacgaaaggaattgtgaaacgcgagatgcacggccacggcattggccgcttctccgaggaagagatttacatgctgatggagaaggacatgcggtctttagcagggcttttggatcatgcaacagcacctcatagagatgcccacctcatctccacattaggccttcaagtcttggccagaagctgcttgcttacaacacagcagccacacactcataccttctatgaaagtgaatgggaaaagccttcagaaccaggcagtggaaaaggatga

SEQ ID NO: 158918 - DNA, 1209 bp, Homo sapiens
tttcgtgcgcagcatgcactggggggttggctttgctttgtttcaggccgtgcgtggtggatctgagctggaaccagagcatctccttcttcggctggtgggccgggtccgaggagcccttctccttttatggggacatcatcgctttccctttgcaggattacggtgggatcatggcagggctgggctccgatccctggtggaagaaaaccctttacttgaccgggggagctttgctggccgcagctgcgtatctgctccacgaactcctggtcattaggaaacagcaagagattgactctaaagatgctattattttgcatcagtttgcaagacctaacaatggtgttccaagtttatctcctttctgtttaaagatggaaacttatttaaggatggctgacttaccgtatcagaactattttggtggaaaactctctgctcaagggaaaatgccttggattgaatataatcatgaaaaagtttctggcacagaattcataattgactttctggaagagaagcttggagtgaatttaaacaaaaaccttggccctcatgaaagagccatctccagagcggtgaccaagatggtggaggagcacttctactgccttccagccgttaacctttgcttttggaataaagttcagctccctgtcctcaggcctgtcctgattgtgcccttgccggcgcctccagcctcgcctcttacaggcttcctcaaatgcagcctgtacccacgtgccccttacagaagttcttgcagttcgtcaggcagctgatgctcttcatgcgtacaccttcaccctctgctctgcccggacattagcttattgccagtgggtggacaatctcaatgagacccggaagatgctctctcttagtggtggtggtcccttcagcaacctgctgaggtgggttgtgtgccacataacgaaaggaattgtgaaacgcgagatgcacggccacggcattggccgcttctccgaggaagagatttacatgctgatggagaaggacatgcggtctttagcagggcttttggatcatgcaacagcacctcatagagatgcccacctcatctccacattaggccttcaagtcttggccagaagctgcttgcttacaacacagcagccacacactcataccttctatgaaagtgaatgggaaaagccttcagaaccaggcagtggaaaaggatga

SEQ ID NO: 158919 - DNA, 454 bp, Homo sapiens; identical to SEQ ID NO: 134114

SEQ ID NO: 158920 - DNA, 2086 bp, Homo sapiens
atggcggccaccgggaccgcggccgccgcagccacgggcaggctcctgcttctgctgctggtggggctcacggcgcctgccttggcgctggccggctacatcgaggctcttgcagccaatgccggaacaggatttgctgttgctgagcctcaaatcgcaatgttttgtgggaagttaaatatgcatgtgaacattcagactgggaaatgggaacctgatccaacaggcaccaagagctgctttgaaacaaaagaagaagttcttcagtactgtcaggagatgtatccagagctacagatcacaaatgtgatggaggcaaaccagcgggttagtattgacaactggtgccggagggacaaaaagcaatgcaagagtcgctttgttacacctttcaagtgtctcgtgggtgaatttgtaagtgatgtcctgctagttccagaaaagtgccagtttttccacaaagagcggatggaggtgtgtgagaatcaccagcactggcacacggtagtcaaagaggcatgtctgactcagggaatgaccttatatagctacggcatgctgctcccatgtggggtagaccagttccatggcactgaatatgtgtgctgccctcagacaaagattattggatctgtgtcaaaagaagaggaagaggaagatgaagaggaagaggaagaggaagatgaagaggaagactatgatgtttataaaagtgaatttcctactgaagcagatctggaagacttcacagaagcagctgtggatgaggatgatgaggatgaggaagaaggggaggaagtggtggaggaccgagattactactatgacaccttcaaaggagatgactacaatgaggagaatcctactgaacccggcagcgacggcaccatgtcagacaaggaaattactcatgatgtcaaagttcctccaactcctctgccaaccaatgatgttgatgtgtatttcgagacctctgcagatgataatgagcatgctcgcttccagaaggctaaggagcagctggagattcggcaccgcaaccgaatggacagggtaaagaaggaatgggaagaggcagagcttcaagctaagaacctccccaaagcagagaggcagactctgattcagcacttccaagccatggttaaagctttagagaaggaagcagccagtgagaagcagcagctggtggagacccacctggcccgagtggaagctatgctgaatgaccgccgtcggatggctctggagaactacctggctgccttgcagtctgacccgccacggcctcatcgcattctccaggccttacggcgttatgtccgtgctgagaacaaagatcgcttacataccatccgtcattaccagcatgtgttggctgttgacccagaaaaggcggcccagatgaaatcccaggtgatgacacatctccacgtgattgaagaaaggaggaaccaaagcctctctctgctctacaaagtaccttatgtagcccaagaaattcaagaggaaattgatgagctccttcaggagcagcgtgcagatatggaccagttcactgcctcaatctcagagacccctgtggacgtccgggtgagctctgaggagagtgaggagatcccaccgttccaccccttccaccccttcccagccctacctgagaacgaaggatctggagtgggagagcaggatgggggactgatcggtgccgaagagaaagtgattaacagtaagaataaagtggatgaaaacatggtcattgacgagactctggatgttaaggaaatgattttcaatgccgagagagttggaggcctcgaggaagagcgggaatccgtgggcccactgcgggaggacttcagtctgagtagcagtgctctcattggcctgctggtcatcgcagtggccattgccacggtcatcgtcatcagcctggtgatgctgaggaagaggcagtatggcaccatcagccacgggatcgtggaggttgatccaatgctcaccccagaagagcgtcacctgaacaagatgcagaaccatggctatgagaaccccacctacaaatacctggagcagatgcagattt

SEQ ID NO: 158921 - DNA, 2018 bp, Homo sapiens
cagccaatgccggaacaggatttgctgttgctgagcctcaaatcgcaatgttttgtgggaagttaaatatgcatgtgaacattcagactgggaaatgggaacctgatccaacaggcaccaagagctgctttgaaacaaaagaagaagttcttcagtactgtcaggagatgtatccagagctacagatcacaaatgtgatggaggcaaaccagcgggttagtattgacaactggtgccggagggacaaaaagcaatgcaagagtcgctttgttacacctttcaagtgtctcgtgggtgaatttgtaagtgatgtcctgctagttccagaaaagtgccagtttttccacaaagagcggatggaggtgtgtgagaatcaccagcactggcacacggtagtcaaagaggcatgtctgactcagggaatgaccttatatagctacggcatgctgctcccatgtggggtagaccagttccatggcactgaatatgtgtgctgccctcagacaaagattattggatctgtgtcaaaagaagaggaagaggaagatgaagaggaagaggaagaggaagatgaagaggaagactatgatgtttataaaagtgaatttcctactgaagcagatctggaagacttcacagaagcagctgtggatgaggatgatgaggatgaggaagaaggggaggaagtggtggaggaccgagattactactatgacaccttcaaaggagatgactacaatgaggagaatcctactgaacccggcagcgacggcaccatgtcagacaaggaaattactcatgatgtcaaagttcctccaactcctctgccaaccaatgatgttgatgtgtatttcgagacctctgcagatgataatgagcatgctcgcttccagaaggctaaggagcagctggagattcggcaccgcaaccgaatggacagggtaaagaaggaatgggaagaggcagagcttcaagctaagaacctccccaaagcagagaggcagactctgattcagcacttccaagccatggttaaagctttagagaaggaagcagccagtgagaagcagcagctggtggagacccacctggcccgagtggaagctatgctgaatgaccgccgtcggatggctctggagaactacctggctgccttgcagtctgacccgccacggcctcatcgcattctccaggccttacggcgttatgtccgtgctgagaacaaagatcgcttacataccatccgtcattaccagcatgtgttggctgttgacccagaaaaggcggcccagatgaaatcccaggtgatgacacatctccacgtgattgaagaaaggaggaaccaaagcctctctctgctctacaaagtaccttatgtagcccaagaaattcaagaggaaattgatgagctccttcaggagcagcgtgcagatatggaccagttcactgcctcaatctcagagacccctgtggacgtccgggtgagctctgaggagagtgaggagatcccaccgttccaccccttccaccccttcccagccctacctgagaacgaagacactcagccggagttgtaccacccaatgaaaaaaggatctggagtgggagagcaggatgggggactgatcggtgccgaagagaaagtgattaacagtaagaataaagtggatgaaaacatggtcattgacgagactctggatgttaaggaaatgattttcaatgccgagagagttggaggcctcgaggaagagcgggaatccgtgggcccactgcgggaggacttcagtctgagtagcagtgctctcattggcctgctggtcatcgcagtggccattgccacggtcatcgtcatcagcctggtgatgctgaggaagaggcagtatggcaccatcagccacgggatcgtggaggttgatccaatgctcaccccagaagagcgtcacctgaacaagatgcagaaccatggctatgagaaccccacctacaaatacctggagcagatgcagatttaggtggca

SEQ ID NO: 158922 - DNA, 505 bp, Homo sapiens
gaatgacaatgccaagcttggcacgaggggctttttggcagtctgttctgagatacgtctccacaacggttacttgaaggaaaatgcatacgggaccagctgccataatatagtcttccctccatacctgccccttcattaggggtttggggagtggatttggaaggctgtgacagaactggttggttaatgggggtcccacaggtacctgcttccttccatcaagcagcaggtagcagaggaaggaggcagtaaataccaaactccccgttcacccagttgcttgctgccgacattctcatgactgtttcaggtcattgacgagactctggatgttaaggaaatgattttcaatgccgaaagagttggaggcctccaggaagagcgggaatccgtgggcccactgcgggaggacttcagtctgagtagcagtgctctcattggcctgctggtcatcgcagtggccattgccacggtcatcgtcatcagcctggtgatgctgagg

SEQ ID NO: 158923 - DNA, 1606 bp, Homo sapiens
atgaagaggaagactatgatgtttataaaagtgaatttcctactgaagcagatctggaagacttcacagaagcagctgtggatgaggatgatgaggatgaggaagaaggggaggaagtggtggaggaccgagattactactatgacaccttcaaaggagatgactacaatgaggagaatcctactgaacccggcagcgacggcaccatgtcagacaaggaaattactcatgatgtcaaagctgtctgctcccaggaggcgatgacggggccctgccgggccgtgatgcctcgttggtacttcgacctctccaagggaaagtgcgtgcgctttatatatggtggctgcggcggcaacaggaacaattttgagtctgaggattattgtatggctgtgtgtaaagcgatgattcctccaactcctctgccaaccaatgatgttgatgtgtatttcgagacctctgcagatgataatgagcatgctcgcttccagaaggctaaggagcagctggagattcggcaccgcaaccgaatggacagggtaaagaaggaatgggaagaggcagagcttcaagctaagaacctccccaaagcagagaggcagactctgattcagcacttccaagccatggttaaagctttagagaaggaagcagccagtgagaagcagcagctggtggagacccacctggcccgagtggaagctatgctgaatgaccgccgtcggatggctctggagaactacctggctgccttgcagtctgacccgccacggcctcatcgcattctccaggccttacggcgttatgtccgtgctgagaacaaagatcgcttacataccatccgtcattaccagcatgtgttggctgttgacccagaaaaggcggccccagatgaaattcccaggtgatgacacatctcccacgtgattgaagaaaggaggaaccaaagcctctctctgctctacaaagtaccttatgtagccccaagaaaattcaagaggaaattgatgagctccttcaggagcagcgtgcagatatggaccagttcactgcctcaatctcagagacccctgtggacgtccgggttatgctctgatgagagtgaggagatcccaccgttccaccccttccaccccttcccagccctacctgagaacgaaggatctggagtgggagagcaggatgggggactgatcggtgccgaagagaaagtgattaacagtaaagaataaagtggatgaaaaacatggtccattgaacgagactctggatgttaaggaaatgattttcaatgccgagagagttggaggcctcgacggaagagcgggaatccgtgggcccactgcgggaggacttcagtctgaagtagcagtgctctcattggcctgctggtcatcgcagtggccattgccacgggtcatcgtcatcagcctggtgatgctgaggaagaggcagtatggcaccatcaagccacgggatcgtggaagggttgatccaatgctcaccccagaagagcgtcacctgaacaagatgcagaaccatggctatgagaaccccacctacaaatacctggagcagatgcagatttaggtggcagggaacgcgg

SEQ ID NO: 158924 - DNA, 3750 bp, Homo sapiens
gtcgcggtgtgctaagcgaggagtccgagtgtgtgagcttgagagccgcgcgctagagcgacccggcgagggatggcggccaccgggaccgcggccgccgcagccacgggcaggctcctgcttctgctgctggtggggctcacggcgcctgccttggcgctggccggctacatcgaggctcttgcagccaatgccggaacaggatttgctgttgctgagcctcaaatcgcaatgttttgtgggaagttaaatatgcatgtgaacattcagactgggaaatgggaacctgatccaacaggcaccaagagctgctttgaaacaaaagaagaagttcttcagtactgtcaggagatgtatccagagctacagatcacaaatgtgatggaggcaaaccagcgggttagtattgacaactggtgccggagggacaaaaagcaatgcaagagtcgctttgttacacctttcaagtgtctcgtgggtgaatttgtaagtgatgtcctgctagttccagaaaagtgccagtttttccacaaagagcggatggaggtgtgtgagaatcaccagcactggcacacggtagtcaaagaggcatgtctgactcagggaatgaccttatatagctacggcatgctgctcccatgtggggtagaccagttccatggcactgaatatgtgtgctgccctcagacaaagattattggatctgtgtcaaaagaagaggaagaggaagatgaagaggaagaggaagaggaagatgaagaggaagactatgatgtttataaaagtgaatttcctactgaagcagatctggaagacttcacagaagcagctgtggatgaggatgatgaggatgaggaagaaggggaggaagtggtggaggaccgagattactactatgacaccttcaaaggagatgactacaatgaggagaatcctactgaacccggcagcgacggcaccatgtcagacaaggaaattactcatgatgtcaaagctgtctgctcccaggaggcgatgacggggccctgccgggccgtgatgcctcgttggtacttcgacctctccaagggaaagtgcgtgcgctttatatatggtggctgcggcggcaacaggaacaattttgagtctgaggattattgtatggctgtgtgtaaagcgatgattcctccaactcctctgccaaccaatgatgttgatgtgtatttcgagacctctgcagatgataatgagcatgctcgcttccagaaggctaaggagcagctggagattcggcaccgcaaccgaatggacagggtaaagaaggaatgggaagaggcagagcttcaagctaagaacctccccaaagcagagaggcagactctgattcagcacttccaagccatggttaaagctttagagaaggaagcagccagtgagaagcagcagctggtggagacccacctggcccgagtggaagctatgctgaatgaccgccgtcggatggctctggagaactacctggctgccttgcagtctgacccgccacggcctcatcgcattctccaggccttacggcgttatgtccgtgctgagaacaaagatcgcttacataccatccgtcattaccagcatgtgttggctgttgacccagaaaaggcggcccagatgaaatcccaggtgatgacacatctccacgtgattgaagaaaggaggaaccaaatcctctctctgctctacaaagtaccttatgtagcccaagaaattcaagaggaaattgatgagctccttcaggagcagcgtgcagatatggaccagttcactgcctcaatctcagagcacccctgtggacgtccgggtgagctctgaggagagtgaggagatcccaccgttccaccccttccaccccttcccagtcctacctgagaacgaagacactcagccggagttgtaccacccaatgaaaaaaggttctggagtgggagagcagcatgggggactgatcggtgccgaagagaaaagtgattaacagtaagaaataaagtggatgaaacattggtcaattgacgagactctggatgttaaggaaatgattttcaatgcgaagagagttggaggcctcgatgaagatctggaaatccgtgggcccactgcgggaggacttctgtctgagtagcagtgctctcattggcctgctggtcatcgcagtggccattgccacgggtcatccgtcatcatcctggtgatgctgaggaagaggcagtatggcaccaatcagccacgggatcgtggatggttgatccaattgctcaccccaagaagagcgtcacctgaaccaagatgcagaaccgatggctatgagaaccccacctacaaatacctggagcaagatgcaagatttaggtggcaggtagcgcggcagccctggcggagggatgcaggtgggccggaagatcccacgattccgatcgacttgccaagcagcaagccgctgccaggggctgcgtcctggacatcctgacctcctggacttgtaggactatataaagtactactgtagaacttgcaatttccattcttttaaatgggtgaaaaatggtaatataacaatatatgatatataaaccttaaatgaaaaaaatgatctattgcagatatttgatgtagttttcttttttaaattaatcagaaaccccacttccattgtattgtctgacacatgctctcaatatataataaatgggaaaatgtcgattttcaataatagacttatatgcaggctgtcgttccggttatgttgtgttaagtcaactcttcagcctcattcactgtccgggcttttatttatggaaaaaaaaggcagtattgcttttttaaatgagctttcaggaagttgctgagaaatggggtggaatagggaactgtaatggccactgaagcacgtgagagaccctcgcaaaatgatgtgaaaggaccagtttcttgaagtccagtgtttccacggctggatacctgtgtgtctccataaaagtcctgtcaccaaggacgttaaaggcattttattccagcgtcttctagagagcttagtgtatacagatgagggtgtccgctgctgctttccttcggaatccagtgcttccacagagattagcctgtagcttatatttgacattcttcactgtctgttgtttacctaccgtagctttttaccgttcacttccccttccaactatgtccagatgtgcaggctcctcctctctggactttctccaaaggcactgaccctcggcctctactttgtcccctcacctccaccccctcctgtcaccggccttgtgacattcactcagagaagaccacaccaaggaggggccgcggctggcccaggagagaacacggggaggtttgtttgtgtgaaaggaaagtagtccaggctgtccctgaaactgagtctgtggacactgtggaaagctttgaacaattgtgttttcgtcacaggagtctttgtaatgcttgtacagttgatgtcgatgctcactgcttctgctttttctttctttttattttaaaaaatctgaaggttctggtaacctgtggtgtatttttattttcctgtgactgtttttgttttgtttttttcctttttcctcccctttagccctattcatgtctctacccactatgcacagattaaacttcacctacaaactccttaatatgatctgtggagaatgtacacagtttaaacacatcaataaatactttaacttccaa

SEQ ID NO: 158925 - DNA, 628 bp, Homo sapiens
  misc_feature (1)...(628): n = a,t,c or g
tcgcgctcggagcccctcagctcaggcggccgaggcggaggcagcggcggcgggatggcggacgccaacaaggccgaggtgcccggggccactggtggcgacagcccgcacctgcagcccgcagagccgccgggcgagccgcggcgagagccgcaccccgcggaggcggagaagcagcagccgcagcacagcagcagctccaatggcgttaaaatggagaatgatgaatcagcaaaagaagagaaatctgacttaaaggaaaaatctacaggaagtaagaaggccaatagatttcatccttattcaaaagacaagaattcgggcactggagaaaagaagggtccaaatcgtaacagagttttcattagcaacatcccatatgacatgaaatggcaagctattaaagatctaatgagagagnaaggatcctgatggagaaaatgctcgtagggcattgcagcgaacaggaggatcatttncaggaggacacgtncctgatatgggattcagggtgatgaatttaccaccttccatactcaataatcccaacattcctcctgaagtatcagtaattttcagggccggagacttggttccacaattttgtgcccatcttgacttcaagtgg

SEQ ID NO: 158926 - DNA, 754 bp, Homo sapiens
ggtttttgttttttgagccgcaccccgcggaggcgaggaagcagcagccgcagcacagcagcagctccaatggcgttaaaatggagaatgatgaatcagcaaaagaagagaaatctgacttaaaggaaaaatctacaggaagtaagaaggccaatagatttcatccttattcaaaagacaagaattcgggcactggagaaaagaagggtccaaatcgtaacagagttttcattagcaacatcccatatgacatgaaatggcaagctattaaagatctaatgagagagaaagttggtgaggttacatacgtggagctctttaaggatgcggaaggaaaatcaaggggttgtggtgtggttgaattcaaagatgaagaatttgtaaagaaagccctagaaactatgaacaaatatgatcttagtggaagacgcgttaatattaaagaggatcctgatggagaaaatgctcgtagggcattgcagcgaacaggaacatcatttcaaggatcacatgcctccgatgtgggatctgggttggtgaatttaccaccttccattctcaataatccaaacattcctcctgaggttatcagcaatttgcaggctggtagacttggttccacaatttttgttgctaatcttgacttcaaagttggttggaagaaattaaaggaagtgttcagcatagctggaactgtgaaagcgggcagatattaaagaagacaaagatggccagagcagaggaatgggcactg

SEQ ID NO: 158927 - DNA, 346 bp, Homo sapiens
catgccgtgtgatgaagaaccatcccaattagaggagctagctgacttcatggagcagcttacaccaattgaaaaatatgctttaaattacctggaattattccatacttctattgagcaagaaaaggagagaaccagtgaggacgcagtgatgactgcagtgagggcatgggagttctggaacctgaagaccctgcaggagagggaggcccggctgcggctggagcaggaggaggcggacctcctgacctacacgcgagaggatgcctacagcatggagtatgtctacgaagatgtcgatgggcagacagaagtcatgccgctctggaccccacccaccccgccc

SEQ ID NO: 158928 - DNA, 431 bp, Homo sapiens; identical to SEQ ID NO: 152991

SEQ ID NO: 158929 - DNA, 1980 bp, Homo sapiens
atggaggtggacttcaaaatcagaaaagtcggccagtggacaatcacccttcaggagcacccagtcagtgttttgctattcatagaagagacccatccagaaaacaaacccacaagtacagcagtagaagaaagccacatcagccgtgatactgtgatggttaattttcagtgtcaacttgactggagtaagggatacctagaggcctatttgaccaaaataaactcgatctgctcccacagattcttgcttgacggctcggtgacctgccacgacgagacaggcagctcgcgggacgcgagagacacggtgggcaccggcgtccgggtgaacgacgagtctgtagagcagctgggcttgaggcgcactatgtggctggggatttgccgcggtgccgccatggccgcggtttccacggtaaccgcgttcgccggaaggccgcgacccggaagaagccggaacccgagagggtgggccggcgactcgaagtggacttccgggtcacggcggagctggctctcacgtggaggcggggaaatttcgcccaccggaatgatcaccaagacacacttttgtttaccttgggctcccagagaagaaaaagaagaagagggtggtcaaagaaccagagactcgatactcagttttaaacaatgatgattactttgctgatgtttctcctttaagagctacatccccctcgtaagagtgtggcccatgggcaggcacctgagatgcctctagtgaagaaaaagaagaagaaaaagaagggtgtcagcaccctttgcgaggagcatgtagaacctgagaccacgctgcctgctagacggacagagaagtcacccagcctcaggaagcaggtgtttggccacttggagttcctcagtggggaaaagaaaaaataagaagtcacctctagccatgtcccatgcctctggggtgaaaacctcccaagaaccctagacagggtgaggaggaaaccagagttggcaagaagctcaaaaaaacacaagaaggaaaaaaaggggggcccaggaccccacagccttctcggtccaggacccttggttctgtgaggccagggaagccagggatgttggggacacttgctcagtggggaagaaggatgaggaacaggcagccttggggcagaaacggaagcggaagagccccagagaacacaatgggaaggtgaagaagaaaaaaaaaatccaccaggagggagatgccctcccaggccactccaagccctccaggtccatggagagcagccctaggaaaggaagtaaaaagaagccagtcaaagttgaggctccggaatacatccccataagtgatgaccctaaggcctccgcaaagaaaaagatgaagtccaaaaagaaggtagagcagccagtcatcgaggagccagctctgaaaaggaagaaaaagaagaagaggaaagagagtggggtagcaggagacccttggaaggaggtagtttttccttcagaaatggactttgccgtgggagaattaagggaaacagacacggacttagaggtggtgttggaaaaaaaaggcaacatggatgaggcgcacatagaccaggtgaggcgaaaggccttgcaagaagagatcgatcgcgagtcaggcaaaacggaagcttctgaaaccaggaagtggacgggaacccagtttggccagtgggatactgctggttttgagaacgaggaccaaaaactgaaatttctcagacttatgggtggcttcaaaaacctgtccccttcgttcagccgccccgccagcacgattgcaaggcccaacatggccctcggcaagaaggcggctgacagcctgcagcagaatctgcagcgggactacgaccgggccatgagctggaagtacagccggggagccggcctcggcttctccaccgcccccaacaagatcttttacattgacaggaacgcttccaagtcagtcaagctggaagattaa

SEQ ID NO: 158930 - DNA, 376 bp, Homo sapiens
cactgctggctttctgcttccccaagggctgccatgcaagtatcaccttatgtatggtagtcaccttatgcccaatgtatggagaaggacaacgaccagagagccaaaaccactcggggatgcagagcccaacacaaggtccctcatgtgggaggtaaagcgttcatcatctggcccttgggtattcaaatcaaacatagcctgccacatacccatcttccgaattacctccaccagctctgcatatgattgccatttactcacagtttttgataattctctggcatcattccaccctgtccacatggctgccatcagccattcagtcaggatatggtcacctttcccttgtgccaactgcctgctcacctgcacc

SEQ ID NO: 158931 - DNA, 958 bp, Homo sapiens
gggtctatcacaaccaaaacctcggaaggagactcccattccatctgataccgaggaggaagaacccctgctgcaggctcaccctgtggtctgccagaaaatagagcatgaacagccacttgggccccaagggttgggccagggaccccctaccgtggtggagcacacttcatatagtgcctacacccccactgagttgtgggagttagctcacccctccctccatcagcggttgcaggtgagcaggcagttggcacaagggaaaggtgaccatatcctgactgaatggctgatggcagccatgtggacagggtggaatgatgccagagaattatcaaaaactgtgagtaaatggcaatcatatgcagagctggtggaggacaccagagatcagaggccacatgtggaattggcaatccactggtaccccaccaatgtacagcaggtgttggtgctggtaggtactgatgcagattatagcctcgtctatgggaaacgggataagtttttaggcaaggctgcatacacagatggttatagaggccagtcagtgaaaatgacagtggactatcaagaactaaataaagtaacagcccctttacatgcagcagtcctgtctatcacggatttgatggaccacctgacgatggaattgggacagtaccattatgcagtggatttggctaatgcatccctttcagatgatatcgctccagagagccaggaacagtttggcttcacatgggaagggcgacaatggactttcacagtgttgccacagggctacgtgcatagtcccaccatatgtcatggtctcgttgctacggatttagccacctggaaatttccaaaggggatccgcctattccattacattgatgatattatgttaacctctgattctcctgcagatttagaagctgtggtgcccctcttgcaacaacatttggcagcatga
